(19) United States
(12) Patent Application Publication
(10) Pub. No.: US 2009/0324575 A1
(43) Pub. Date: Dec. 31, 2009

(54) LYSOSOMAL PHOSPHOLIPASE A2 (LPLA2) ACTIVITY AS A DIAGNOSTIC AND THERAPEUTIC TARGET FOR IDENTIFYING AND TREATING SYSTEMIC LUPUS ERYTHEMATOSIS

(75) Inventors: James A. Shayman, Ann Arbor, MI (US); Akira Abe, Ann Arbor, MI (US); Robert Kelly, Trenton, MI (US); Jessica Kollmeyer, Ypsilanti, MI (US); Ye Lu, Ann Arbor, MI (US)

Correspondence Address: MARSHALL, GERSTEIN & BORUN LLP, 233 SOUTH WACKER DRIVE, 6300 SEARS TOWER, CHICAGO, IL, 60606-6357, US

(73) Assignee: THE REGENTS OF THE UNIVERSITY OF MICHIGAN, Ann Arbor, MI (US)

(21) Appl. No.: 12/495,209

(22) Filed: Jun. 30, 2009

Related U.S. Application Data
(60) Provisional application No. 61/076,913, filed on Jun. 30, 2008.

(51) Int. Cl. A61K 38/46; C12N 5/00; A01K 67/00; C12Q 1/44; A61P 37/06

(52) U.S. Cl. 424/94.6; 435/375; 800/9; 435/19

(57) ABSTRACT

The present invention is directed to methods for diagnosis and treatment of systemic lupus erythematosus and drug-induced systemic lupus erythematosus. More specifically, the specification describes methods using a lysosomal phospholipase A2 in methods for the diagnosis and treatment of autoimmune disorders such as systemic lupus erythematosus and drug-induced systemic lupus erythematosus.

[0001] This invention was made with government support under Grant No. RO1DK055823 awarded by The National Institutes of Health. The government has certain rights in the invention.

### FIELD OF INVENTION

[0002] The present invention is generally directed to methods for diagnosing and treating systemic lupus erythematosus (SLE) and symptoms thereof.

### BACKGROUND OF THE RELATED ART

[0003] Systemic lupus erythematosus (SLE) is an autoimmune disease that affects multiple organs. The clinical manifestations are variable, but are often involve the skin, kidneys, liver, lungs, heart, and lymphoid organs. LPLA2 knockout mice (Hiraoka et al., Mol Cell Biol 26, 6139-6148, 2006) display a highly robust late onset lymphoproliferation that phenocopies SLE. More specifically, the mouse phenotype is characterized by splenomegaly, lymphadenopathy, penumonitis, hepatitis, and glomerulonephritis with renal insufficiency and immunoglobulin, C3 and C1q depositions. These mice are also characterized by high levels of circulating immunoglobulins and high titers of anti-nuclear antibodies (ANA) and anti-double stranded DNA antibodies (anti-dsDNA). This striking phenotype raises the question of whether LPLA2 mediates the immunological processes that are aberrantly regulated in lupus.

[0004] Therefore, there remains a need in the art for a better understanding of the causes of SLE and for the identification of new therapeutic interventions for such autoimmune disorders.

### SUMMARY OF THE INVENTION

[0005] Lysosomal phospholipase A2 (LPLA2) has several unique features, including lipase and transacylase activities, lysosomal localization, and acidic pH optimum. Based on these features, double conditional gene targeting was employed to elucidate the function of LPLA2. LPLA2 deficient mice were generated by the systemic deletion of exon 5 of the LPLA2 gene, which encodes the lipase motif essential for LPLA2 activity. LPLA2 null mice displayed features of systemic lupus erythematosus (SLE) that included late onset lymphoproliferative phenotype, expansion of lymphoid tissues, renal failure and glomerulonephritis, high circulating immunoglobulin levels, positive antinuclear antibodies (ANA) and anti-double stranded DNA antibodies, and the accumulation of undigested apoptotic or tingible bodies in macrophages.

[0006] The present invention unexpectedly demonstrates that LPLA2 mediates an immunological process that is aberrantly regulated in SLE. Thus, the present invention demonstrates a role for loss of LPLA2 enzyme activity as a marker of active SLE. Work described herein demonstrates that decreased levels of LPLA2 can be used as a diagnostic and therapeutic target for both identifying and treating symptoms of SLE.

[0007] As used herein, “LPLA2” means full-length lysosomal phospholipase A2 enzymes, also referred to as Group XV phospholipase A2, regardless of species of origin, as well as all fragments, derivatives and enzymatically active variants thereof. The term “variant” refers to additions, deletions or substitutions of amino acids. The term “derivative” encompasses additional chemical modification of LPLAs, such as chemical modification of amino acids or incorporation of modified amino acids, conjugation to hydrophilic polymers, or conjugation to other chemical moieties.

[0008] “LPLA2 enzymatic activity” refers to the ability of LPLA2 to degrade extracellular phospholipids to form free fatty acids and lyso-phophatidylcholine and lyso-phosphatidylethanolamine.

[0009] “LPLA2 catalytic consensus sequence” refers to amino acids -A-X-S-X-G- at positions 196-200 of SEQ ID NO: 1.

[0010] “LPLA2 autoantibodies” refers to antibodies produced by an individual that are immunospecific to the individual's own LPLA2 protein.

[0011] “Tingible body macrophages” refers to enlarged macrophages resulting from the inability of spleen cells to clear apoptotic cells.

[0012] As used herein, “SLE” includes systemic lupus erythematosus or any other autoimmune disease displaying the symptom of accumulation of tingible body macrophages. “Drug-induced lupus” refers to the onset of lupus symptoms such as the accumulation of tingible body macrophages upon chronic treatment with certain drugs.

[0013] The present invention provides methods for reducing the accumulation of tingible body macrophages in an individual comprising the step of contacting a cell having an accumulation of tingible body macrophages with an agent having LPLA2 enzymatic activity in an amount and over a time to reduce the accumulation of tingible body macrophages.

[0014] In one aspect, the agent having LPLA2 activity is a protein having an amino acid sequence selected from SEQ ID NOs: 1-288.

[0015] In another aspect, the agent is a mammalian LPLA2 enzyme. In one embodiment, the agent is a mammalian LPLA2 enzyme having an amino acid sequence selected from SEQ ID NOs: 1-288 or an enzymatically active fragment, derivative or variant thereof.

[0016] In yet another aspect, the agent is a human LPLA2 enzyme. In one embodiment, the agent is a human LPLA2 enzyme having the amino acid sequence in SEQ ID NO: 1 or an enzymatically active fragment, derivative or variant thereof.

[0017] In one embodiment, the agent is a LPLA2 enzyme comprising one or more mannose residues or one or more mannose-6-phosphate residues.

[0018] In another embodiment, the agent is a human LPLA2 enzyme or variant or derivative thereof comprising the catalytic site corresponding to amino acids 196-200 of SEQ ID NO: 1 (-A-X-S-X-G-).

[0019] In some embodiments, the human LPLA2 enzyme, variant or derivative thereof further comprises a cysteine bond corresponding to the cysteine bond between the Cys at position 65 and the Cys 89 of SEQ ID NO: 1.

[0020] In one aspect, the agent is a human LPLA2 enzyme or variant or derivative thereof comprising an amino acid sequence having at least 65%, 70%, 75%, 80%, 85%, 90%, 95% or higher identity to the amino acid sequence of a fragment of SEQ ID NO: 1 that is at least 50, 75, 100, 125, 150, 175, 200 or 225 residues in length and that comprises the catalytic site corresponding to amino acids 196-200 of SEQ ID NO: 1 (-A-X-S-X-G-).

[0021] In another aspect, the agent is a LPLA2 enzyme comprising the catalytic consensus sequence -A-X-S-X-G-. In still another aspect, the agent is a LPLA2 enzyme comprising the catalytic consensus sequence corresponding to amino acids 196-200 (-A-X-S-X-G-) of SEQ ID NO: 1. In related aspects, the LPLA2 enzyme comprises a cysteine bond corresponding to the cysteine bond between the Cys at position 65 and the Cys 89 of SEQ ID NO: 1.

[0022] The present invention further provides methods for treating a condition associated with aberrant LPLA2 activity in an individual comprising the step of administering an agent having LPLA2 enzymatic activity to said individual in an amount effective to alleviate the condition.

[0023] In one aspect, the invention provides methods for treating a patient diagnosed with a disorder characterized by the intracellular accumulation of tingible body macrophages comprising administering to the patient an effective amount of an agent having LPLA2 enzymatic activity.

[0024] In another aspect, the condition is aberrant LPLA2 enzymatic activity. In another aspect, the condition is aberrant LPLA2 mRNA transcription. In still another aspect, the condition is the accumulation of tingible body macrophages. In yet another aspect, the condition is SLE or systemic lupus erythematosus. In another aspect, the condition is drug-induced lupus.

[0025] In one embodiment, the individual has a polymorphism in the LPLA2 gene corresponding to SEQ ID NO: 1 that reduces expression or activity of LPLA2. The human genomic DNA sequence encoding human LPLA2 enzyme is set forth in SEQ ID NO: 289. The human genomic DNA sequence is 15715 bases. The human mRNA sequence is predicted to correspond to nucleotides 1 . . . 210, 3947 . . . 4103, 9576 . . . 9694, 9939 . . . 10037, 10423 . . . 10647, and 13803 . . . 15715). The coding region is predicted to correspond to nucleotides 84 . . . , 210, 3947 . . . 4103, 9576 . . . 9694, 9939 . . . 10037, 10423 . . . 10647, and 13803 . . . 14314. The human cDNA sequence encoding human LPLA2 enzyme is set forth in SEQ ID NO: 290. In some embodiments, the individual has a polymorphism at a position in the gene that encodes the catalytic site corresponding to amino acids 196-200 of SEQ ID NO: 1. In other embodiments, the individual has a polymorphism that results in truncation of the LPLA2 enzyme or loss of cationic amino acids. In yet another embodiment, the individual has a polymorphism in a regulatory control region associated with the LPLA2 gene that results in loss of LPLA2 enzyme expression.

[0026] In a further aspect, the agent having LPLA2 activity is a protein having an amino acid sequence selected from SEQ ID NOs: 1-288.

[0027] In another aspect, the agent is a mammalian LPLA2 enzyme. In one embodiment, the agent is a mammalian LPLA2 enzyme having an amino acid sequence selected from SEQ ID NOs: 1-288 or an enzymatically active fragment, derivative or variant thereof.

[0028] In yet another aspect, the agent is a human LPLA2 enzyme. In one embodiment, the agent is a human LPLA2 enzyme having the amino acid sequence in SEQ ID NO: 1 or an enzymatically active fragment, derivative or variant thereof.

[0029] In one embodiment, the agent is a human LPLA2 enzyme, variant or derivative thereof, comprising the catalytic site corresponding to amino acids 196-200 (A-X-S-X-G) of SEQ ID NO: 1. In another aspect, the agent is a LPLA2 enzyme, variant or derivative thereof comprising the catalytic consensus sequence -A-X-S-X-G-.

[0030] In some embodiments, the LPLA2 enzyme, variant or derivative further comprises a cysteine bond corresponding to the cysteine bond between the Cys at position 65 and the Cys 89 of SEQ ID NO: 1.

[0031] In one aspect, the agent is a human LPLA2 enzyme, variant or derivative thereof comprising an amino acid sequence having at least 65%, 70%, 75%, 80%, 85%, 90%, 95% or higher identity to the amino acid sequence of a fragment of SEQ ID NO: 1 that is at least 50, 75, 100, 125, 150, 175, 200 or 225 residues in length and that comprises the catalytic site corresponding to amino acids 196-200 of SEQ ID NO: 1 (-A-X-S-X-G-). In related aspects, the LPLA2 enzyme further comprises a cysteine bond corresponding to the cysteine bond between the Cys at position 65 and the Cys 89 of SEQ ID NO: 1

[0032] In one embodiment, the individual has a polymorphism that reduces expression or activity of LPLA2. In another embodiment, the individual has a polymorphism at a position corresponding to amino acids 196-200 of SEQ ID NO: 1. In a further embodiment, the individual has a polymorphism that results in truncation of the LPLA2 enzyme or loss of cationic amino acids. In yet another embodiment, the individual has a polymorphism in the regulatory control region of LPLA2 that results in loss of LPLA2 enzyme expression.

[0033] In yet another aspect, the agent is is an LPLA2 enzyme comprising one or more mannose residues.

[0034] The present invention also provides methods for screening potential therapeutics that decrease intracellular levels of tingible body macrophages comprising the step of measuring the level of intracellular tingible body macrophages in the LPLA2 null mouse model in the presence or absence of a test compound where a decrease in the level of intracellular tingible body macrophages in the presence of the test compound compared to the level of intracellular tingible body macrophages in the absence of the test compound identifies the test compound as a potential therapeutic.

[0035] The present invention also provides methods for diagnosing SLE in an individual comprising the step of determining LPLA2 enzymatic activity in a sample from an individual, wherein a LPLA2 enzymatic activity that is decreased in the individual compared to a LPLA2 enzymatic activity in a normal individual is suggestive of SLE and wherein said normal individual is known not to suffer from SLE. As used here throughout, “normal individual” refers to an individual known not to suffer from a specified disease.

[0036] The present invention further provides methods for diagnosing SLE in an individual comprising the step of detecting LPLA2 autoantibodies in a sample from an individual, wherein a detecting increased LPLA2 autoantibodies in the individual compared to detecting LPLA2 autoantibodies in a normal individual is suggestive of SLE and wherein said normal individual is known not to suffer from SLE.

[0037] The present invention provides methods for diagnosing SLE in an individual comprising the step of detecting LPLA2 enzymatic activity in the individual, wherein a LPLA2 enzymatic activity that is decreased in the individual compared to prior LPLA2 enzymatic activity in the same individual is suggestive of SLE.

[0038] The present invention also provides methods for diagnosing SLE in an individual comprising the step of detecting LPLA2 autoantibodies in the individual, wherein detecting increased LPLA2 autoantibodies in the individual compared to prior detection of LPLA2 autoantibodies in the same individual is suggestive of SLE.

[0039] The present invention provides methods for determining susceptibility to SLE in an individual comprising the step of determining LPLA2 enzymatic activity in a sample from the individual, wherein a decreased LPLA2 enzymatic activity in the individual compared to LPLA2 enzymatic activity in a normal individual indicates susceptibility to SLE.

[0040] The present invention further provides methods for determining susceptibility to SLE in an individual comprising the step of detecting LPLA2 autoantibodies in a sample from the individual, wherein detecting increased LPLA2 autoantibodies in the individual compared to detecting LPLA2 autoantibodies in a normal individual indicates susceptibility to SLE.

[0041] The present invention also provides methods for determining susceptibility to SLE in an individual comprising the step of detecting LPLA2 enzymatic activity in a sample from the individual, wherein a LPLA2 enzymatic activity that is decreased in the individual compared to prior LPLA2 enzymatic activity in the same individual is suggestive of susceptibility to SLE.

[0042] The present invention further provides methods for determining susceptibility to SLE in an individual comprising the step of detecting LPLA2 autoantibodies in a sample from the individual, wherein detecting increased LPLA2 autoantibodies in the individual compared to prior detection of LPLA2 autoantibodies in the same individual is suggestive of susceptibility to SLE.

[0043] Also provided by the present invention are methods for determining the progression of SLE in an individual comprising the step of determining LPLA2 enzymatic activity in samples from the individual taken over time, wherein a decrease in LPLA2 enzymatic activity in samples taken over time in the individual is suggestive of SLE progression.

[0044] The present invention also provides methods for determining the progression of SLE in an individual comprising the step of detecting LPLA2 autoantibodies in samples from the individual taken over time, wherein an increase in LPLA2 autoantibodies in the samples taken over time in the individual is suggestive of SLE progression.

[0045] In various embodiments of methods of the invention, LPLA2 mRNA levels and/or LPLA2 protein levels are used to measure LPLA2 enzymatic activity in the sample.

[0046] In various aspects of the methods, the sample is a bodily fluid, tissue and/or organ of said individual.

[0047] In other aspects of the methods, the tissue is a spleen specimen.

[0048] In another aspect of the methods, the fluid is serum or plasma.

[0049] The foregoing summary is not intended to define every aspect of the invention, and additional embodiments are described in other sections, such as the Detailed Description. The entire document is intended to be related as a unified disclosure, and it should be understood that all possible combinations of features described herein may be contemplated, even if the combination of features are not found together in the same sentence, or paragraph, or section of this document.

[0050] Moreover, the invention includes any one or all embodiments of the invention that are narrower in scope in any way than the variations defined by specific paragraphs herein. For example, where certain aspects of the invention are described as a genus, it should be understood that every member of a genus is, individually, an embodiment of the invention, and that combinations of two or more members of the genus are embodiments of the invention.

### BRIEF DESCRIPTION OF THE DRAWINGS

[0051] FIG. 1A. Pathways for lysosomal phospholipase A2. In the presence of an acceptor such as ceramide (N-acetylsphingosine (NAS)) the enzyme behaves as a transacylaselphosphlipase A2, akin to LCAT. With only water as an acceptor, LPLA2 behaves as a traditional phospholipase A2.

[0052] FIG. 1B. Comparison of the catalytic triads and disulfide linkages seen in LPLA2 and LCAT.

[0053] FIG. 1C. Comparison of deduced amino acid sequences of human, mouse, and bovine LPLA2s. Position 1 refers to the first amino acid residue of the predicted coding region in human and mouse. The dashed boxes indicate the N-glycosylation site consensus motifs, and the solid box indicates a lipase motif. The shaded boxes indicate the amino acids Ser, Asp, and His composing the catalytic triad. The axial line is a putative signal peptide cleavage site. Asterisks denote identical amino acids among these three species.

[0054] FIG. 2. Gross anatomical changes in 20 month old LPLA2−/− knockout and LPLA2+/+ wild type mice.

[0055] FIG. 3. Histological changes in 20 month old LPLA2−/− knockout and LPLA2+/+ wild type mice. Tissues sections were stained with periodic acid Schiff reagent. Pink staining cells represent lipid laden macrophages.

[0056] FIG. 4A. Immunofluorescent staining of LPLA2−/− knockout and LPLA2+/+ wild type mouse kidneys for Ig heavy chain and C1q.

[0057] FIG. 4B. Anti-dsDNA titers for 3-4 month old, 12-14 month old and 24 month old LPLA2+/+ wild type and LPLA2 null mice.

[0058] FIG. 4C. ANA staining of HeLa cells from 12 month old LPLA2+/+ wild type and LPLA2−/− knockout mice. Both homogenous and speckled nuclear stainings are observed in assays using the knockout mouse sera.

[0059] FIG. 4D. Identification of tingible bodies associated with macrophages in spleens from LPLA2−/− knockout mice. Frozen sections were stained for CD68 (red) and apoptotic bodes with a TUNEL stain (green).

[0060] FIG. 5A-5C. Immunofluorescence staining of macrophages from LPLA2 null mice, treated with recombinant LPLA2. LPLA2 was added to the null cells for 2 hours. The macrophages were then fixed and stained with either anti-LPLA2 monoclonal antibody (green) (FIG. 5A) or an antibody against the lysosomal marker LAMP-1 (red) (FIG. 5B). Alex-flour coupled secondary antibodies were used to assess uptake and co-localization (FIG. 5C).

[0061] FIG. 6. 24 hour protein excretion in knockout (KO) LPLA2−/− mice versus wild type (WT) LPLA2+/+ mice.

[0062] FIGS. 7A-7H. The binding, endocytosis, and clearance of apoptotic thymocytes by peritoneal macrophages from wild type (WT) mice (FIGS. 7A-7D) and knockout (KO) mice (FIGS. 7E-7H). Time dependent changes in endocytosed thymocytes were detected by anti-CD68 (red) and TUNEL assay (green).

[0063] FIG. 8. Phagocytic index of macrophages from WT and KO mice, as measured by the number of apoptotic bodies/macrophage. The graphed values represent the mean± SD (n=8) per time point. * denotes p<0.05.

[0064] FIGS. 9A-9D. B and T cell proliferation studies in 6 or 8 month old WT and KO mice.

[0065] FIGS. 10A-10B. Effects of the cationic amphiphilic drugs PDMP and amiodarone on 1-O-acylceramide synthase activity (FIG. 10A) and cellular phospholipids content (FIG. 10B).

[0066] FIGS. 11A-11B. Effect of negatively charged lipid on LPLA2 activity. Liposomes consisting of Di-octanoyl-PC (DOPC)/N-acetylsphingosine (NAS) or DOPC/sulfatide/NAS were incubated with LPLA2 enzyme, and the reaction product, 1-O-oleoyl-NAS was plotted against time (FIG. 11A). Liposomes consisting of DOPC/galactosylceramide/NAS or DOPC/sulfatide/NAS with different molar ratios of sulfatide were incubated with LPLA2 enzyme, and the reaction product, 1-O-oleoyl-NAS was plotted against molar ratio.

[0067] FIG. 12A. Effect of ion strength on LPLA2 activity. 1-O-oleoyl-NAS plotted against NaCl concentration (mM).

[0068] FIG. 12B. Effect of pH on LPLA2 activity. 1-O-oleoyl-NAS plotted against pH.

[0069] FIG. 12C. Effect of cationic amphiphilic drug on LPLA2 activity. Liposomes consisting of DOPC sulfatide and NAS were pre-incubated with different concentrations of a cationic amphiphilic drug, amiodarone and then incubated with LPLA2 enzyme. 1-O-oleoyl-NAS plotted against concentration of drug (μM).

[0070] FIG. 13A-13C. Co-sedimentation of LPLA2 with liposomes. Liposomes consisting of DOPC or DOPC/sulfatide were incubated with varying amounts of LPLA2 and the reaction product was separated by SDS-PAGE (FIG. 13A). Liposomes consisting of DOPC, DOPC/sulfatide or glactosylceramide (GalCer) were incubated with LPLA2 and the reaction product was analyzed by SDS-PAGE (FIG. 13B). Liposomes consisting of DOPC or DOPC/sulfatide were incubated with LPLA2 at varying pH with or without NaCl or amiodarone (AMIOD) and the reaction product was analyzed by SDS-PAGE.

### DETAILED DESCRIPTION OF INVENTION

[0071] Systemic lupus erythematosus remains a poorly understood autoimmune disorder. Much progress has been made in the last twenty years in identifying genetic models that resemble the lupus phenotype. However, this previous work has not readily been translated into new diagnostic tools for better defining lupus patients or into new therapeutics for the treatment of these unfortunate patients. The identification herein of a secreted, lysosomal protein where the loss of function plays an important role in SLE has several important implications. First, as a secreted protein, serum LPLA2 activity may be a valuable marker of disease activity. Second, the existence of autoantibodies to LPLA2 may be mechanistically important in a subset of patients with SLE. Third, if a deficiency, inherited or acquired, in LPLA2 underlies the development of SLE in a subset of patients, then the protein itself may be a useful therapeutic agent. Mannose-terminated lysosomal proteins are the basis for enzyme replacement strategies for a growing list of lysosomal storage diseases. These include type I Gaucher disease, Fabry disease and Hunter syndrome. Previous studies demonstrating the avid binding, incorporation, and trafficking of LPLA2 in macrophages suggest that this strategy might be applied to SLE as well.

[0072] The present invention is directed to methods of treating disorders characterized by the intracellular accumulation of tingible body macrophages by administering compositions comprising LPLA2, including fragments, variants or derivatives thereof, compositions that augment, increase or otherwise stimulate the activity of LPLA2, and compositions that increase or otherwise stimulate the expression of LPLA2. Such compositions may be used for catabolizing phospholipids and/or increasing digestion or clearance of apoptotic bodies in mammalian tissue and/or reducing accumulation of tangible body macrophages in mammalian tissue. It is therefore contemplated that such compositions will be useful for ameliorating signs and symptoms of a disorder that involves the accumulation of tingible body macrophages, or reducing complications experienced by patients suffering from the disorder. Disorders characterized by intracellular accumulation of tangible body macrophages include systemic lupus erythematosis, drug-induced lupus, neonatal lupus, and cutaneous lupus, rheumatoid arthritis,

[0073] In a related aspect, the invention provides methods for identifying additional agents that decrease intracellular levels of tingible body macrophages through augmenting, increasing or otherwise stimulating the activity of LPLA2, or increasing or otherwise stimulating the expression of LPLA2.

[0074] In yet another related aspect, the invention provides methods for diagnosis of, or the determination of the susceptibility to, SLE or systemic lupus erythematosus by assaying body fluid or tissue samples from patients for the presence of LPLA2 autoantibodies or for reduced LPLA2 expression or activity. Similar methods are provided for monitoring progression of SLE or systemic lupus erythematosus.

[0075] The present application demonstrates the involvement of a particular lysosomal phospholipase A2 in the digestion and clearance of apoptotic bodies. Mice lacking LPLA2 exhibit glomerulonephritis with proteinuria, renal failure and associated with immune complex deposition that includes C3, C1q, and Ig,. Macrophages in the spleen of LPLA2 null mice display very high levels of TUNEL positive, tingible bodies representing endocytosed but undegraded apoptotic bodies. Isolated peritoneal macrophages from LPLA2−/− mice are characterized by the inability to digest apoptotic thymocytes but normal capacity to bind and endocytose apoptotic thymocytes. The finding that macrophages from LPLA2 null mice fail to digest engulfed apoptotic bodies indicates that this impairment is due to the absence of LPLA2. Treatment with exogenous LPLA2 is expected to increase digestion and clearance of apoptotic bodies, and to reduce accumulation of tingible body macrophages.

[0076] The data also show that cationic amphiphilic drugs inhibit LPLA2 activity and result in cellular phospholipidosis. The mechanism underlying this inhibition appears to be interference with the electrostatic interactions between LPLA2 and anionic lipid membranes.

[0077] Finally, the data also demonstrate that mRNA expression of LPLA2 is decreased in the microdissected glomeruli of patients with lupus, compared to the glomeruli of normal controls and glomeruli of patients with other glomerular diseases resulting from diabetes, hypertensive nephrosclerosis, minimal change disease, and IgA nephropathy. Tin gible body macrophages

[0078] Tingible body macrophages are large, mononuclear phagocytic cells found in the germinal centers of lymphatic tissue (Smith et al., Developmental Immunology 6(3-4): 285-294, 1998). These macrophages contain many phagocytized, apoptotic cells (referred to as tingible bodies) in various states of degradation (Swartzendruber and Congdon, Journal of Cell Biology 19: 641-646, 1963; Tabe et al, Acta Otolaryngologica Supplement 523: 64-67, 1996). These cells have been referred to as type-1 phagocytes. (Kotani et al., Acta Anatomica (Basel) 99(4): 391-402, 1977)

[0079] These macrophages sometimes range in size from 20-30 μm or larger and contain a variable number of inclusions. The inclusions represent not only nuclear, but also cytoplasmic debris in varying stages of lysis. Various cell types form the debris constituting tingible bodies. For example, plasmacyte and lymphocyte debris, granulocytes as well as phagocytized erythrocytes have been identified in macrophages from germinal centers. (Swartzenbruber et al., J. Cell Biology, 19:641-646, 1963)

[0080] One of the earliest changes in apoptosis is the exposure of phosphatidylserine (PS) and phosphatidylethanolamine (PE) on the outer leaflet of the plasma membrane. Tingible body macrophages strongly express milk fat globule epidermal growth factor-8 (MFG-E8) which binds to apoptotic cells by recognizing PS and enhances the engulfment of apoptotic cells. Knock-out mice lacking expression of MFG-E8 carry many unengulfed apoptotic cells in the germinal centers of the spleen, and develop a lupus-like autoimmune disease (Hanayama et al., Science 304(5674): 1147-1150, 2004 and Current Directions in Autoimmunity 9: 162-172, 2006). Apoptotic bodies are characterized by intact plasma membranes and expression of PS on the outer leaflet of the plasma membrane.

[0081] Increased accumulation of tangible body macrophages is found lymph node germinal centers of rheumatoid arthritis patients (Imai et al., Acta Pathol Jpn. 1989 February;39(2): 127-34).

[0082] SLE and Clearance of Apoptotic Cells

[0083] The failed or reduced clearance of apoptotic cells has emerged as one of the most popular hypotheses for the development of autoimmunity (Erwig et al., Am J Pathol 171: 2-8, 2007; Savill et al., Nature 407: 784-788, 2000; Tanaka et al., Curr Med Chem 14: 2892-2897, 2007). The clearance of apoptotic cells by phagocytosis can be divided into four distinct steps. These steps include the recruitment of phagocytes to the sites where apoptotic cells are located, the recognition of apoptotic cells through receptors and bridging molecules, the endocytosis of apoptotic bodies into phagocytes, and the digestion of endocytosed cell bodies. While a great deal of progress has been made in delineating the mechanisms associated with recognition and endocytosis, very little has been elucidated with regard to the digestion of apoptotic bodies that have been endocytosed.

[0084] There are three characteristic features of lupus that may reflect the impairment of apoptotic cell clearance. These pathogenomic features include the lupus erythematosus (LE) cell (Hargraves et al., Mayo Clin Proc 23: 25-28, 1948), hematoxylin bodies (Wilson et al, Am J Med Sci 241: 31-43, 1961), and tingible body macrophages (Baumann et al., Arthritis Rheum 46: 191-201, 2002). What little that has been published on the ultrastructural characterization of these pathological abnormalities suggests that they represent the persistent presence of apoptotic bodies ingested by phagocytic cells in the bone marrow, kidney and lung, and lymphoid tissues respectively (Ruiz-Arguelles et al., Scand J Clin Lab Invest Suppl 235: 31-37, 2001; Swartzendruber et al., J Cell Biol 19: 641-646, 1963). Baumann et al. (2002) have reported that apoptotic cells are not properly cleared by tingible body macrophages of the germinal centers in a sub-group of patients with SLE. (Baumann et al., Arthritis and Rheumatism 46(1): 191-201, 2002).

[0085] SLE includes systemic lupus erythematosus or any other autoimmune disease displaying SLE symptoms or accumulation of tingible body macrophages. Autoantibodies play a role in disease development in SLE. (Rahman, Rheumatology 43(11):1326-1336, 2004; Ehrenstein, Rheumatology 38: 691-693, 1999). Targets of autoantibodies in systemic lupus erythematosus include nuclear and cytoplasmic macromolecules, lipid components and plasma proteins. Autoantibodies are involved in disease development either by forming immune complexes that lodge in target organs, disrupting normal organ function, or by cross-reacting with targeted antigens and damaging tissue. The most frequently associated autoantibodies in systemic lupus erythematosis include antibodies to Smith (a ribonucleoprotein), and antibodies to nucleosomes, histones, and double stranded (ds) DNA. Anti-ds DNA antibodies are the most frequently detected antibodies in SLE. Titers of dsDNA antibodies can be used to diagnose systemic lupus and evaluate disease activity.

[0086] Systemic lupus erythematosus is a multisystem disease. The most common initial signs of the disease are fatigue, fever, and muscle and joint pain. Muscle pain (myalgia), joint pain (arthralgia) and arthritis are common with the new onset of lupus and with subsequent flare-ups. The muscles themselves can sometimes become inflamed and very painful contributing to weakness and fatigue. The most frequent joints involved in lupus arthritis are those of the hand, knees, and wrists. Complications caused by reduced blood flow to a joint can cause death of the bone in the joint (avascular necrosis). Avascular necrosis occurs most commonly in the hips and knees.

[0087] Skin symptoms occur in more than 90% of patients with lupus and can include many different types of rashes. The classic lupus rash is a redness on the cheeks (malar blush) often brought on by sun exposure. Discoid lupus with red skin patches on the skin and scaliness is a characteristic rash that can lead to scarring. It usually occurs on the face and scalp and can lead to loss of scalp hair (alopecia).

[0088] Kidney complications, glomerulonephritis due to deposition of immune complexes in the kidney, are observed in more than half of all patients with lupus. Severe kidney disease often requires immunosuppressive therapy. More than 50% of patients with lupus have lung complications. Inflammation of the lining of the lung (pleurisy) is common. Pleural effusions can occur as well. Inflammation of the arteries (vasculitis) can occur, as well as inflammation around the heart (pericarditis). Patients with lupus are also more predisposed to develop atherosclerosis.

[0089] Nervous system involvement occurs in about 15% of patients with lupus. Potential symptoms include seizures, nerve paralysis, severe depression, psychosis, and strokes. Spinal cord inflammation in lupus is rare but can cause paralysis. About half of patients with lupus have anemia and/or thrombocytopenia and/or leukopenia. Some lupus patients are predisposed to developing blood clots. This is most likely to occur in patients who have antiphospholipid antibodies. Inflammation or infection of the intestines can occur, due to a blood clot or inflammation of blood vessels in the intestines. Some patients experience intermittent interruptions in blood supply to the hand (Raynaud's syndrome), which manifests as whiteness, blueness and pain in the fingers.

[0090] Drug-induced lupus (DIL) is a disorder with symptoms similar to systemic lupus erythematosus, which is induced by chronic use of certain drugs. Drug-induced lupus is a well-known entity, accounting for 5-10% of all lupus syndromes has been reported as a side-effect of long-term therapy with over 40 medications. (Rubin, Toxicology 209(2):135-47, 2005; Perez-Garcia et al., Rheumatology, 45(1):114-116, 2006). Its clinical and laboratory features are similar to systemic lupus erythematosus, except that patients generally recover after the offending medication is discontinued. Although over 40 medications are known to be associated with drug-induced lupus, the three that report the highest numbers are: procainamide (brand name Pronestyl, used to treat heart arrythmias), hydralazine (brand name Apresoline, used to tread hypertension) and quinidine (brand name Quinaglute, used to treat heart arrythmias). (Hofstra, Drug Metab Rev 26 (3):485-505, 1994; Uetrecht et al. Chem Res Toxicol 1 (1): 74-8, 1998). Drugs that cause drug-induced lupus include Acebutolol, Amiodarone, Bupropion, Captopril, Carbamazepine, Chlorpromazine, Diltiazem, Docetaxel, Ethosuximide, Gemfibrozil, Glyburide, Gold salt, Griseofulvin, Hydantoins, Hydralazine, hydroxychloroquine, Interferons, Interleukins, Isoniazid, Leuprolide acetate, Lithium, Lovastatin, Mephenytoin, Methyldopa, Minocycline, Nitrofurantoin, Olanzapine, Ophthalmic timolol, Oral contraceptives, Penicillamine, Phenytoin, Practolol, Procainamide, Propylthiouracil, Quinidine, Reserpine, Rifampin, Simvastatin, Sulfasalazine, Tetracycline, Ticlopidine, Tiotropium bromide inhaler, Trimethadione, Tumor necrosis factor, Valproate, or Voriconazole. Drugs that cause flares of systemic lupus erythematosus are as follows: Cimetidine, Hydralazine, Hydrochlorothiazide, Mesantoin, P -Aminobenzoic acid (PABA), Penicillin, Phenylbutazone, Sulfonamides, or Terbinafine.

[0091] Lysosomal Phospholipase A2 and the Phospholipase Superfamily

[0092] The present section provides a general description of the family of phospholipases, and LPLA2 enzymes specifically.

[0093] The phospholipase A2 superfamily is comprised of a broad range of enzymes that share the ability to hydrolyze the sn-2 ester bond of phospholipids. The products of this reaction, free fatty acid and lysophospholipid, have important biological roles. The former is not only an important source of cellular energy, but is also the substrate for additional cellular messengers in the form of arachidonate metabolites. The latter products play signaling roles in addition to having important effects on membrane remodeling and membrane perturbation. Historically the PLA2s were thought to be small, secreted enzymes characterized by having a catalytic histidine, calcium dependence and being disulfide rich. The family of enzymes greatly expanded with the discovery of cytosolic PLA2 activity assignable to a protein that lacked disulfide bonds and characterized by presence of a catalytic serine (Gronich et al., J Biol Chem 263: 16645-16651, 1988). Currently there are fifteen groups of phospholipase A2s. Groups I, II, II, V, IX, X, and XI utilize a catalytic histidine and are of small molecular weight (13-15 kDa). Groups IV, VI, VII, and VIII utilize a nucleophilic serine and have little or no Ca2+ requirement for catalysis. The molecular weights are larger (26-114 kDa). Many members of these latter groups have C2 domains, are members of the α/βfold hydrolase proteins, and may contain a required Ser/His/Asp triad for activity.

[0094] Lysosomal phospholipase A2 (LPLA2, LLPL, LYPLA3), also known as 1-O-acylceramide synthase, was recently recognized as the first member of a new group XV of PLA2s (Schaloske et al., Biochim Biophys Acta 1761: 1246-1259, 2006). LPLA2 is a single-chain, mannose-rich glycoprotein having a molecular mass of about 40 kDa. LPLA2 has both lipase and transacylase activities, and an acidic pH optimum. It is specific for the phospholipids phosphatidylcholine (PC) and phosphatidylethanolamine (PE). The protein is selectively and highly expressed in alveolar macrophages but is also present to a lesser degree in peritoneal macrophages, peripheral blood monocytes, or other tissues. Other macrophage-associated phospholipase A2s do not show a comparable distribution.

[0095] LPLA2 is secreted from macrophages and mast cells in response to agonists. LPLA2 is recognized by cellular mannose receptors and is reincorporated and trafficked back to the lysosome when exogenously administered. The secretion of LPLA2 results in the formation of bioactive lipid ligands with known effects on lymphocyte recruitment, proliferation, and cytokine production.

[0096] In 1996, the existence of a novel pathway for ceramide metabolism was reported (Abe, A., Shayman, J. A., and Radin, N. S. J Biol Chem 271, 14383-14389, 1996). This pathway results in the formation of a highly lipophilic metabolite of ceramide, 1-O-acylceramide (FIG. 1A). Under this reaction, a fatty acid from the sn-2 position of phosphatidylcholine or phosphatidylethanolamine is transferred to the C-1 hydroxyl group of ceramide. Upon purification of the enzyme, it was determined that either ceramide or water could serve as acceptors for sn-2 fatty acid (Abe, A., and Shayman, J. A. J Biol Chem 273, 8467-8474, 1998). In the presence of ceramide, LPLA2 catalyzes the formation of 1-O-acylceramide by transacylation of fatty acids from the sn-2 position of phosphatidylcholine or phosphatidylethanolamine. When water serves as the acceptor, in the absence of ceramide or other alcohols, the enzyme acts as a traditional phospholipase A2. Two characteristics of this phospholipase A2 immediately became apparent. First, the enzyme displayed acidic pH optimum, about 4.5; second, the enzyme localized to lysosomes.

[0097] Based on the enzyme purification, several partial amino acid sequences of LPLA2 were determined and the full length of coding and full length amino acid sequences determined (Hiraoka et al., J Biol Chem 277, 10090-10099, 2002). The expressed protein was confirmed to have both phospholipase A2 and transacylase activities. Analysis of the coding sequence revealed LPLA2 is 49% identical at the amino acid level with lecithin cholesterol acyltransferase (LCAT). Most of the identity was localized to the catalytic domain (FIG. 1B). Both LCAT and LPLA2 colocalized to 16q22 where they are contiguously placed, consistent with one gene arising from a duplication event. Phylogenetic analysis revealed that both genes were derived from diacylglycerol acyltransferase and that LPLA2 is ancestral to LCAT.

[0098] The sequence of human LPLA2 is set forth in SEQ ID NO: 1. A more detailed analysis of the catalytic domain revealed that LPLA2 contains a consensus sequence, -A-X-S-X-G- (amino acids 196-200 of SEQ ID NO: 1), present in other phospholipase A2s and acylhydrolases. The serine is part of a catalytic triad composed of an asparagine and histidine residue in close approximation and serving to convert the serine into a strong nucleophile. Site directed mutagenesis of the triad amino acids eliminated the intrinsic phospholipase and transacylase activities of LPLA2. Additional analysis revealed the presence of a single disulfide bridge between Cys65 and Cys89 (Hiraoka, M., Abe, A., and Shayman, J. A. J Lipid Res 46, 2441-2447, 2005). More recently, the sn-I versus sn-2 specificity of the enzyme has been assessed. LPLA2 displays high specificity toward phospholipids containing arachidonate in the sn-2 position. However, both sn-I and sn-2 hydrolase activities are seen when other fatty acyl substitutions are present (Abe, A., Hiraoka, M., and Shayman, J. A. J Lipid Res 47, 2268-2279, 2006). Other lipophilic alcohols besides ceramide can serve as acceptors for the fatty acid via the transacylation activity (Abe, A., Hiraoka, M., and Shayman, J. A. J Lipid Res 48, 2255-2263, 2007).

[0099] The divalent cations Ca2+ and Mg2+ enhance, but are not required for, LPLA2 transacylase activity. LPLA2 is neither activated nor inhibited in the presence of ATP or thiol reagents such as dithiothreitol and NEM. Thus the enzyme differs from groups I, II, and III phospholipase A2s, which are highly sensitive to such reagents. The phospholipase A2 inhibitors bromoenollactone (BEL) and nonadecyltetraenyl trifluoromethyl ketone (AACOF3) do not inhibit the enzyme activity.

[0100] LPLA2 is a high mannose-type glycoprotein, suggesting that the released enzyme might be reincorporated into macrophages via a mannose or mannose-6- phosphate receptor. Recombinant glycosylated mouse LPLA2 produced by HEK293 cells was applied to LPLA2-deficient (LPLA2−/−) mouse alveolar macrophages. The uptake of exogenous LPLA2 into LPLA2−/− alveolar macrophages occurred in a concentration-dependent manner and colocalized with the lysosomal marker, Lamp-1. (Abe et al. J. Immunol, 181(11):7873-81, 2008) This uptake was significantly suppressed in the presence of alpha-methyl-mannoside but not in the presence of mannose 6-phosphate. Thus, the predominant pathway for uptake of exogenous LPLA2 is via the mannose receptor. (Abe et al., J. Immunol, 181(11):7873-81, 2008).

[0101] LPLA2 Fragments, Variants and Derivatives

[0102] LPLA2 that are useful according to the methods of the invention may comprise an amino acid sequence of any one of SEQ ID NOs: 1-288, or biologically active fragments or variants or derivatives thereof. Compositions comprising such LPLA2, fragments, variants or derivatives are used in the treatment of disorders involving impaired clearance of apoptotic bodies and/or accumulation of tingible body macrophages. Polynucleotides encoding the LPLA2, fragments or variants thereof, are also useful in the present invention, e.g. for gene therapy purposes or recombinant production of the protein.

[0103] LPLA2 proteins include any mammalian protein that comprises the amino acid sequences of SEQ ID NOs: 1-288, a fragment of SEQ ID NOs: 1-288, or a variant or conservative substitution variant of a protein of SEQ ID NOs: 1-288, or a derivative thereof that retains the desired biological activity. In certain aspects, the LPLA2 protein is derived from any natural source, e.g., a mammalian origin such as human (SEQ ID NO: 1), bovine, murine (e.g., of these sequences are depicted in FIG. 1C and Hiraoka et al., J Biol Chem 277, 10090-9, 2002), or alternatively, it is produced synthetically or through recombinant methods known to those of skill in the art. For the purposes of treating disorders associated with accumulation of tingible body macrophages, e.g., SLE or systemic lupus erythematosus, the desired retained biological activity is a catabolic effect on phospholipids, and/or improved clearance of apoptotic bodies and/or reduced accumulation of tingible body macrophages.

[0104] A. Fragments and Variants

[0105] Truncation of amino acids at the N-terminus or C-terminus of any of SEQ ID NO: 1-288 may provide fragments that retains the desired biological activity. Fragments of at least 10, 20, 30, 40, 50, 60, 70, 80, 90, 100, 110, 120, 130, 140, or 150 consecutive amino acids are contemplated. Such fragments preferably comprise the catalytic consensus sequence, -A-X-S-X-G-, corresponding to amino acids 196-200 of SEQ ID NO: 1. Such fragments may also include a cysteine bond corresponding to the cysteine bond between the Cys at position 65 and the Cys 89 of SEQ ID NO: 1.

[0106] The term “variant” is intended to mean a protein derived from the native protein by deletion or addition of one or more amino acids at one or more sites in the native protein and/or substitution of one or more amino acids at one or more sites in the native protein. Variants are readily made by any of the variety of means known in the art, including through recombinant production. Polynucleotides encoding variants may be made, e.g. through site-directed mutagenesis of polynucleotides encoding LPLA2, or through direct synthesis of the encoding polynucleotide sequence.

[0107] Biologically active variants of a native LPLA2 protein of the invention will have at least about 40%, 45%, 50%, 55%, 60%, 65%, 70%, 75%, 80%, 85%, 90%, 91%, 92%, 93%, 94%, 95%, 96%, 97%, 98%, 99% or more sequence identity to the amino acid sequence for the native protein as determined by sequence alignment programs. A biologically active variant of a protein of the invention may differ from that protein by as few as 1-15 amino acid residues, as few as 1-10, such as 6-10, as few as 5, as few as 4, 3, 2 or even 1 amino acid residue. Biologically active variants alternatively are encoded by a polynucleotide that hybridizes under stringent conditions to the complement of a polynucleotide that encodes SEQ ID NO: 1. Highly stringent conditions include hybridization and wash conditions of relatively low ionic strength and high temperature. Exemplary highly stringent wash conditions comprise washing in 0.1×SSC at 65-68° C. Exemplary moderately stringent wash conditions comprise washing in 1×SSC at 55° C.

[0108] As another example, conservative substitution or non-conservative substitution, insertion or deletion of amino acid residues of any of SEQ ID NO: 1-288 may produce variants that retain the desired biological activity and/or retain three-dimensional conformation structure of the protein of SEQ ID NOs: 1-288. Such variants preferably comprise the catalytic consensus sequence, -A-X-S-X-G-. Such variants may also include a cysteine bond corresponding to the cysteine bond between the Cys at position 65 and the Cys 89 ofSEQ ID NO: 1.

[0109] The term “conservative substitution” as used herein denotes the replacement of an amino acid residue by another, biologically similar residue with respect to hydrophobicity, hydrophilicity, cationic charge, anionic charge, shape, polarity and the like. Examples of conservative substitutions include the substitution of one hydrophobic residue such as isoleucine, valine, leucine, alanine, cysteine, glycine, phenylalanine, proline, tryptophan, tyrosine, norleucine or methionine for another, or the substitution of one polar residue for another, such as the substitution of arginine for lysine, glutamic acid for aspartic acid, or glutamine for asparagine, and the like. Neutral hydrophilic amino acids which are substituted for one another include asparagine, glutamine, serine and threonine. The term “conservative substitution” also includes the use of a substituted or modified amino acid in place of an unsubstituted parent amino acid provided that antibodies raised to the substituted polypeptide also immunoreact with the unsubstituted polypeptide. By “substituted” or “modified” the present invention includes those amino acids that have been altered or modified from naturally occurring amino acids.

[0110] As such, it should be understood that in the context of the present invention, a conservative substitution is recognized in the art as a substitution of one amino acid for another amino acid that has similar properties. Exemplary conservative substitutions are set out in e.g., Alternatively, conservative amino acids are grouped as described in Lehninger, (Biochemistry, Second Edition; Worth Publishers, Inc. N.Y.:N.Y. (1975), pp.71-77). Those of skill in the art are aware of numerous tables that indicate specific conservative substitutions. One exemplary such table is provided below:

Table of Exemplary Conservative Substitutions

| Original | |
|---|---|
| Residue | Exemplary Substitution |
| Ala (A) | Val, Leu, Ile |
| Arg (R) | Lys, Gln, Asn |
| Asn (N) | Gln, His, Lys, Arg |
| Asp (D) | Glu |
| Cys (C) | Ser |
| Gln (Q) | Asn |
| Glu (E) | Asp |
| His (H) | Asn, Gln, Lys, Arg |
| Ile (I) | Leu, Val, Met, Ala, Phe, |
| Leu (L) | Ile, Val, Met, Ala, Phe |
| Lys (K) | Arg, Gln, Asn |
| Met (M) | Leu, Phe, Ile |
| Phe (F) | Leu, Val, Ile, Ala |
| Pro (P) | Gly |
| Ser (S) | Thr |
| Thr (T) | Ser |
| Trp (W) | Tyr |
| Tyr (Y) | Trp, Phe, Thr, Ser |
| Val (V) | Ile, Leu, Met, Phe, Ala |

[0111] Any variant of a protein of SEQ ID NOs: 1-288 that retains most or all of the catalytic domain of the LPLA2 of SEQ ID NOs: 1-288 is contemplated to be useful in the methods of the present invention. As described above, the catalytic domain of LPLA2 contains the consensus sequence, -A-X-S-X-G-, present in other phospholipase A2s and acylhydrolases. The serine is part of a catalytic triad composed of an asparagine and histidine residue in close approximation and serving to convert the serine into a strong nucleophile. One approach to making variants is to begin with conservative substitutions within or near the catalytic domain, while retaining the consensus catalytic sequence, followed by conservative substitutions or non-conservative substitutions, insertions or deletions outside of the catalytic domain. LPLA2 of SEQ ID NO: 1 has 50% homology to cholesterol lecithin acyltransferase (LCAT), and the majority of this homology is within the catalytic domain. Thus, it is contemplated that those of skill in the art may choose to produce variants of SEQ ID NO: 1 in which the catalytic domain of SEQ ID NO: 1 is replaced by the catalytic domain of an LCAT (Hiraoka et a., J Biol Chem 277, 10090-9, 2002), as long as such a variant retains its property of catalyzing phospholipid breakdown. Such activities are readily assessed as described herein below.

[0112] In addition, rational drug design is used to produce structural variants of the LPLA2 proteins and thus provide additional compositions for use in the methods contemplated herein. By creating such variants, the skilled worker can fashion LPLA2-derived proteins which are more active or stable than the natural molecules which have different susceptibility to alteration or which may affect the function of various other molecules. In one approach, it is desirable to generate a three-dimensional structure for LPLA2-derived protein of interest or a fragment thereof e.g., by x-ray crystallography, computer modeling or by a combination of both approaches. An alternative approach, “alanine scan,” involves systematic replacement of residues throughout the protein with alanine, followed by determining the resulting effect on function.

[0113] Furthermore, nonpeptide variants of LPLA2-derived proteins that provide a stabilized structure or lessened biodegradation, are also contemplated. Peptide mimetic variants are prepared based on the underlying LPLA2 protein structure by replacing one or more amino acid residues of the protein of interest by nonpeptide moieties. In one aspect, the nonpeptide moieties permit the peptide to retain its natural confirmation, or stabilize a bioactive confirmation. One example of methods for preparation of nonpeptide mimetic variants from peptides is described in Nachman et a., Regul. Pept. 57:359-370 (1995). “Peptide” as used herein embraces all of the foregoing.

[0114] B. Derivatives

[0115] In addition to the basic amino acid structure of the proteins, it is contemplated that the LPLA2 proteins will be modified to enhance their uptake, decrease toxicity, increase circulatory time, or modify biodistribution of the LPLA2 proteins. For example, any modification that facilitates the greater uptake of LPLA2 compositions by macrophages, e.g. modifications that increase mannose residues, are contemplated. Mannose content of LPLA2 can be increased, for example, by chemical conjugation of mannose, by treatment with enzymes that expose or add mannose to glycosylation sites, or by modification of recombinant production methods to favor high mannose content of the resulting glycoprotein. Compositions of LPLA2 with high mannose content can alternatively be prepared by affinity purification using a matrix coupled to mannose binding protein, e.g. a mannose receptor, a mannose-binding lectin, and the like.

[0116] The compounds of the invention may also be covalently or noncovalently associated with a carrier molecule, such as a linear polymer (e.g., polyethylene glycol, polylysine, dextran, etc.), a branched-chain polymer (see, for example, U.S. Pat. No. 4,289,872; U.S. Pat. No. 5,229,490; WO 93/21259 ); a lipid; a cholesterol group (such as a steroid); or a carbohydrate or oligosaccharide. Other possible carriers include antibody moieties, and in particular constant regions derived from an antibody. Still other possible carriers include one or more water soluble polymer attachments such as polyoxyethylene glycol, or polypropylene glycol as described U.S. Pat. Nos: 4,640,835, 4,496,689, 4,301,144, 4,670,417, 4,791,192 and 4,179,337. Still other useful polymers known in the art include monomethoxy-polyethylene glycol, dextran, cellulose, or other carbohydrate based polymers, poly-(N-vinyl pyrrolidone)-polyethylene glycol, propylene glycol homopolymers, a polypropylene oxide/ethylene oxide co-polymer, polyoxyethylated polyols (e.g., glycerol) and polyvinyl alcohol, as well as mixtures of these polymers.

[0117] For example, an Fc region can be fused to the N-terminus or C-terminus (or both) of the LPLA2 protein, fragment or variant. Multiple vehicles, as exemplified herein, may also be used; e.g., an Fc at a terminus and a PEG group at the other terminus or a side chain.

[0118] In various embodiments, the Fc component is either a native Fc or an Fc variant. By way of example and without limitation, the Fc component is an Fc region of the human immunoglobulin IGGI heavy chain or a biologically active fragment, derivative, or dimer thereof, see Ellison, J. W. et al., Nucleic Acids Res. 10:4071-4079 (1982). It is understood, however, that an Fc region for use in the invention may be derived from an IgG, IgA, IgM, IgE or IgD from any species. Native Fc domains are made up of monomeric polypeptides that may be linked into dimeric or multimeric forms by covalent (i.e., disulfide bonds) and/or non-covalent association. The number of intermolecular disulfide bonds between monomeric subunits of native Fc molecules ranges from 1 to 4 depending on class (e.g., IgG, IgA, IgE) or subclass (e.g., IgG1, IgG2, IgG3, IgA1, IgGA2). One example of a native Fc is a disulfide-bonded dimer resulting from papain digestion of an IgG (see Ellison et al. (1982), Nucleic Acids Res. 10: 4071-9).

[0119] Various water-soluble polymers have been shown to modify biodistribution, improve the mode of cellular uptake, change the permeability through physiological barriers, and modify the rate of clearance from the body. (Greenwald et al., Crit Rev Therap Drug Carrier Syst. 2000;17:101-161; Kopecek et al., J Controlled Release., 74:147-158, 2001). To achieve either a targeting or sustained-release effect, water-soluble polymers have been synthesized that contain drug moieties as terminal groups, as part of the backbone, or as pendent groups on the polymer chain.

[0120] Polyethylene glycol (PEG), has been widely used as a drug carrier, given its high degree of biocompatibility and ease of modification. Harris et a., Clin Pharmacokinet. 2001;40(7):539-51 Attachment to various drugs, proteins, and liposomes has been shown to improve residence time and decrease toxicity. (Greenwald et al., Crit Rev Therap Drug Carrier Syst. 2000;17:101-161; Zalipsky et al., Bioconjug Chem. 1997;8:111-118). In one aspect, PEG is coupled to active agents through the hydroxyl groups at the ends of the chain and via other chemical methods; however, PEG itself is limited to at most two active agents per molecule. In a different approach, copolymers of PEG and amino acids were explored as biomaterials which retain the biocompatibility properties of PEG, but which have the added advantage of numerous attachment points per molecule (providing greater drug loading), and which could be synthetically designed to suit a variety of applications (Nathan et al., Macromolecules. 1992;25:4476-4484; Nathan et al., . Bioconj Chem. 1993;4:54-62).

[0121] Those of skill in the art are aware of PEGylation techniques for the effective modification of drugs. For example, drug delivery polymers that consist of alternating polymers of PEG and tri-functional monomers such as lysine have been used by VectraMed (Plainsboro, N.J.). The PEG chains (typically 2000 daltons or less) are linked to the α- and ε-amino groups of lysine through stable urethane linkages. Such copolymers retain the desirable properties of PEG, while providing reactive pendent groups (the carboxylic acid groups of lysine) at strictly controlled and predetermined intervals along the polymer chain. In one aspect, the reactive pendent groups are used for derivatization, cross-linking, or conjugation with other molecules. These polymers are useful in producing stable, long-circulating pro-drugs by varying the molecular weight of the polymer, the molecular weight of the PEG segments, and the cleavable linkage between the drug and the polymer. The molecular weight of the PEG segments affects the spacing of the drug/linking group complex and the amount of drug per molecular weight of conjugate (smaller PEG segments provides greater drug loading). In general, increasing the overall molecular weight of the block co-polymer conjugate increases the circulatory half-life of the conjugate. Nevertheless, the conjugate must either be readily degradable or have a molecular weight below the threshold-limiting glomular filtration (e.g., less than 45 kDa). Thus, in one aspect, PEGylated LPLA2 proteins are in the range of between 20 and 35 kDa in molecular weight.

[0122] Another set of useful derivatives are the LPLA2 proteins conjugated to other therapeutic agents or diagnostic agents, including tracers, or radioisotopes. Useful conjugation partners include: radioisotopes, such as 90Yttrium, 131Iodine, 225Actinium, and 213Bismuth; ricin A toxin, microbially derived toxins such as Pseudomonas endotoxin (e.g., PE38, PE40), and the like; partner molecules in capture systems (see below); biotin, streptavidin (useful as either partner molecules in capture systems or as tracers, especially for diagnostic use); and chemotherapeutic agents.

### Methods of Making LPLA2 Proteins

[0123] LPLA2 proteins can be produced by conventional automated peptide synthesis methods or by recombinant expression. General principles for designing and making proteins are well known to those of skill in the art.

[0124] A. Automated Solid-Phase Peptide Synthesis

[0125] In one aspect any protein of the invention is synthesized in solution or on a solid support in accordance with conventional techniques. Various automatic synthesizers are commercially available and is used in accordance with known protocols. See, for example, Stewart and Young, Solid Phase Peptide Synthesis, 2d. ed., Pierce Chemical Co., (1984); Tam et al., J. Am. Chem. Soc., 105:6442, (1983); Merrifield, Science, 232: 341-347, (1986); and Barany and Merrifield, The Peptides, Gross and Meienhofer, eds, Academic Press, New York, 1-284, (1979), each incorporated herein by reference. As such, LPLA2 proteins, fragments and variants thereof are readily synthesized and optionally screened for a related activity e.g., aclyceramide synthase activity assays.

[0126] For example, the peptides are synthesized by solid-phase technology employing an exemplary peptide synthesizer such as a Model 433A from Applied Biosystems Inc. In such cases, the purity of any given peptide substrate, generated through automated peptide synthesis or through recombinant methods, is typically determined using reverse phase HPLC analysis. Chemical authenticity of each peptide is established by any method well known to those of skill in the art. In certain embodiments, the authenticity is established by mass spectrometry. Additionally, the peptides also are quantified using amino acid analysis in which microwave hydrolyses are conducted, e.g. using a microwave oven such as the CEM Corporation's MDS 2000 microwave oven. In certain aspects, the samples are analyzed by reverse phase HPLC and quantification is achieved using an enhanced integrator. Those of skill in the art are referred to Hiraoka et a., which describes details of methods of determining amino acid sequence of LPLA2 using a combination of reverse phase HPLC and mass spectrometry. Such methods are well known to those of skill in the art and are readily adapted for the sequence analysis of any protein or peptide.

[0127] B. Recombinant Protein Production

[0128] As an alternative to automated peptide synthesis, recombinant DNA technology is employed wherein a nucleotide sequence which encodes a peptide of the invention is inserted into an expression vector, transformed or transfected into an appropriate host cell and cultivated under conditions suitable for expression as described herein below. In one aspect, a nucleotide sequence that encodes a protein of SEQ ID NOs: 1-288, a fragment or variant thereof is provided. Recombinant methods are especially useful for producing longer polypeptides for use in the methods of the invention.

[0129] A variety of expression vector/host systems are known in the art. These include but are not limited to microorganisms such as bacteria transformed with recombinant bacteriophage, plasmid or cosmid DNA expression vectors; yeast transformed with yeast expression vectors; insect cell systems infected with virus expression vectors (e.g., baculovirus); plant cell systems transfected with virus expression vectors (e.g., cauliflower mosaic virus, CaMV; tobacco mosaic virus, TMV) or transformed with bacterial expression vectors (e.g., Ti or pBR322 plasmid); or animal cell systems. Mammalian cells that are useful in recombinant protein productions include but are not limited to VERO cells, HeLa cells, Chinese hamster ovary (CHO) cell lines, COS cells (such as COS-7), W138, BHK, HepG2, 3T3, RIN, MDCK, A549, PC12, K562 and 293 cells. Exemplary protocols for the recombinant expression of the LPLA2 polypeptides in bacteria, yeast and other invertebrates are known to those of skill in the art and briefly described below.

[0130] Expression vectors for use in prokaryotic hosts generally comprise one or more phenotypic selectable marker genes. Such genes generally encode, e.g., a protein that confers antibiotic resistance or that supplies an auxotrophic requirement. A wide variety of such vectors are readily available from commercial sources. Examples include pSPORT vectors, pGEM vectors (Promega), pPROEX vectors (LTI, Bethesda, MD), Bluescript vectors (Stratagene), pET vectors (Novagen) and pQE vectors (Qiagen).

[0131] The DNA sequence encoding the given protein or fusion polypeptide is amplified by PCR and cloned into a vector, for example, pGEX-3X (Pharmacia, Piscataway, N.J.) designed to produce a fusion protein comprising glutathione-S-transferase (GST), encoded by the vector, and a protein encoded by a DNA fragment inserted into the vector's cloning site. Typically, the primers for the PCR are generated to include for example, an appropriate cleavage site. Plasmid DNA from individual transformants is purified and partially sequenced using an automated sequencer to confirm the presence of the desired encoding nucleic acid insert in the proper orientation. The vector is transformed into cells and the LPLA2 protein of interest is purified and recovered by cleavage of the recombinant fusion protein with thrombin or factor Xa (Pharmacia, Piscataway, N.J.).

[0132] The secreted recombinant protein is purified from the bacterial culture media by conventional protein purification methods. Similar systems for the production of recombinant protein in yeast host cells are readily commercially available, e.g., the Pichia Expression System (Invitrogen, San Diego, Calif.), following the manufacturer's instructions. Another alternative recombinant production is achieved using an insect system. Insect systems for protein expression are well known to those of skill in the art. In one such system, Autographa californica nuclear polyhedrosis virus (AcNPV) is used as a vector to express foreign genes in Spodoptera frugiperda cells or in Trichoplusia larvae. The substrate coding sequence is cloned into a nonessential region of the virus, such as the polyhedrin gene, and placed under control of the polyhedrin promoter. Successful insertion of substrate will render the polyhedrin gene inactive and produce recombinant virus lacking coat protein coat. The recombinant viruses are then used to infect S. frugiperda cells or Trichoplusia larvae in which the substrate is expressed (Smith et a., J Virol 46: 584, 1983; Engelhard EK et a., Proc Nat Acad Sci 91: 3224-7, 1994).

[0133] Mammalian host systems for the expression of recombinant proteins also are well known to those of skill in the art. Host cell strains are typically chosen for a particular ability to process the expressed protein or produce certain post-translation modifications that will be useful in providing protein activity. Such modifications of the polypeptide include, but are not limited to, acetylation, carboxylation, glycosylation, phosphorylation, lipidation and acylation. Post-translational processing which cleaves a “prepro” form of the protein may also be important for correct insertion, folding and/or function. Different host cells such as CHO, HeLa, MDCK, 293, WI38, and the like, have specific cellular machinery and characteristic mechanisms for such post-translational activities and are chosen to ensure the correct modification and processing of the introduced, foreign protein.

[0134] In one aspect, the transformed cells are used for long-term, high-yield protein production and as such stable expression is desirable. Once such cells are transformed with vectors that contain selectable markers along with the desired expression cassette, the cells are allowed to grow for 1-2 days in an enriched media before they are switched to selective media. The selectable marker is designed to confer resistance to selection and its presence allows growth and recovery of cells which successfully express the introduced sequences. Resistant clumps of stably transformed cells are proliferated using tissue culture techniques appropriate to the cell.

[0135] A number of selection systems are useful to recover the cells that have been transformed for recombinant protein production. Such selection systems include, but are not limited to, HSV thymidine kinase, hypoxanthine-guanine phosphoribosyltransferase and adenine phosphoribosyltransferase genes, in tk-, hgprt- or aprt- cells, respectively. In other aspects, anti-metabolite resistance is used as the basis of selection for dhfr, which confers resistance to methotrexate; gpt, which confers resistance to mycophenolic acid; neo, which confers resistance to the aminoglycoside G418; als which confers resistance to chlorsulfuron; and hygro, which confers resistance to hygromycin. Additional selectable genes that are useful include trpB, which allows cells to utilize indole in place of tryptophan, or hisD, which allows cells to utilize histinol in place of histidine. Markers that give a visual indication for identification of transformants include anthocyanins, β-glucuronidase and its substrate, GUS, and luciferase and its substrate, luciferin.

[0136] C. Expression Constructs for Recombinant Protein Production

[0137] Recombinant production of the LPLA2 proteins of the invention employs vectors comprising polynucleotide molecules that encode LPLA2 proteins. Methods of preparing such vectors as well as producing host cells transformed with such vectors are well known to those skilled in the art. In one aspect, the polynucleotide molecules used (e.g., a polynucleotide encoding a polypeptide of SEQ ID NOs: 1-288 or a fragment or variant thereof) are joined to a vector, which generally includes a selectable marker and an origin of replication, for propagation in a host. These elements of the expression constructs are well known to those of skill in the art. Generally, the expression vectors include DNA encoding the given protein being operably linked to suitable transcriptional or translational regulatory sequences, such as those derived from a mammalian, microbial, viral, or insect gene. Examples of regulatory sequences include transcriptional promoters, operators, or enhancers, mRNA ribosomal binding sites, and appropriate sequences which control transcription and translation.

[0138] The terms “expression vector,” “expression construct” or “expression cassette” are used interchangeably throughout this specification and are meant to include any type of genetic construct containing a nucleic acid coding for a gene product in which part or all of the nucleic acid encoding sequence is capable of being transcribed, operably linked to a regulatory sequence.

[0139] The choice of a suitable expression vector for expression of the peptides or polypeptides of the invention will of course depend upon the specific host cell to be used, and is within the skill of the ordinary artisan. Methods for the construction of mammalian expression vectors are disclosed, for example, in Okayama and Berg (Mol. Cell. Biol. 3:280 (1983)); Cosman et al. (Mol. Immunol. 23:935 (1986)); Cosman et al. (Nature 312:768 (1984)); EP-A-0367566; and WO 91/18982.

[0140] In one aspect, expression construct comprises a selectable marker that allows for the detection of the expression of a peptide or polypeptide. Usually the inclusion of a drug selection marker aids in cloning and in the selection of transformants, for example, neomycin, puromycin, hygromycin, DHFR, zeocin and histidinol. Alternatively aspects employ enzymes such as herpes simplex virus thymidine kinase (tk) (eukaryotic), β-galactosidase, luciferase, or chloramphenicol acetyltransferase (CAT) (prokaryotic) as markers. Alternatively, immunologic markers also are employed. For example, epitope tags such as the FLAG system (IBI, New Haven, Conn.), HA and the 6xHis system (Qiagen, Chatsworth, Calif.) are employed. Additionally, glutathione S-transferase (GST) system (Pharmacia, Piscataway, N.J.), or the maltose binding protein system (NEB, Beverley, Mass.) also are used. The selectable marker employed is not believed to be important, so long as it is capable of being expressed simultaneously with the nucleic acid encoding a gene product. Further examples of selectable markers are well known to one of skill in the art.

[0141] Expression requires that appropriate signals be provided in the vectors, such as enhancers/promoters from both viral and mammalian sources that are used to drive expression of the nucleic acids of interest in host cells. Usually, the nucleic acid being expressed is under transcriptional control of a promoter. A “promoter” refers to a DNA sequence recognized by the synthetic machinery of the cell, or introduced synthetic machinery, required to initiate the specific transcription of a gene. Nucleotide sequences are operably linked when the regulatory sequence functionally relates to the DNA encoding the peptide substrate or the fusion polypeptide. Thus, a promoter nucleotide sequence is operably linked to a given DNA sequence if the promoter nucleotide sequence directs the transcription of the sequence. Similarly, the phrase “under transcriptional control” means that the promoter is in the correct location and orientation in relation to the nucleic acid to control RNA polymerase initiation and expression of the gene.

[0142] Any promoter that will drive the expression of the nucleic acid is used. The particular promoter employed to control the expression of a nucleic acid sequence of interest is not believed to be important, so long as it is capable of directing the expression of the nucleic acid in the targeted cell. Thus, where a human cell is targeted, it is preferable to position the nucleic acid coding region adjacent to and under the control of a promoter that is capable of being expressed in a human cell. In one aspect, such a promoter includes either a human or viral promoter. Common promoters include, e.g., the human cytomegalovirus (CMV) immediate early gene promoter, the SV40 early promoter, the Rous sarcoma virus long terminal repeat, β-actin, rat insulin promoter, the phosphoglycerol kinase promoter and glyceraldehyde-3-phosphate dehydrogenase promoter, all of which are promoters well known and readily available to those of skill in the art and are used to obtain high-level expression of the coding sequence of interest. The use of other viral or mammalian cellular or bacterial phage promoters which are well-known in the art to achieve expression of a coding sequence of interest is contemplated as well, provided that the levels of expression are sufficient for a given purpose. By employing a promoter with well known properties, the level and pattern of expression of the protein of interest following transfection or transformation is optimized. Inducible promoters also are contemplated for use.

[0143] Another regulatory element that is used in protein expression is an enhancer. These are genetic elements that increase transcription from a promoter located at a distant position on the same molecule of DNA. Where an expression construct employs a cDNA insert, one will typically desire to include a polyadenylation signal sequence to effect proper polyadenylation of the gene transcript. Any polyadenylation signal sequence recognized by cells of the selected transgenic animal species is suitable for the practice of the invention, such as human or bovine growth hormone and SV40 polyadenylation signals.

[0144] Also contemplated as an element of the expression cassette is a terminator. These elements serve to enhance message levels and to minimize read through from the cassette into other sequences. The termination region is selected for convenience, since termination regions for the applications such as those contemplated by the present invention appear to be relatively interchangeable. In certain aspects, the termination region is native with the transcriptional initiation, in other embodiments, it is native to the DNA sequence of interest, or alternatively it is derived for another source.

[0145] Gene Therapy

[0146] Expression vector can also be used for gene therapy to effect the expression of the protein in vivo. In one aspect, the expression constructs are introduced into the cells targeted for treatment using any methods known to those of skill in the art. For example, the expression constructs form part of a viral delivery vector. In other embodiments, non-viral delivery is contemplated. Receptor-mediated delivery also is contemplated (Ridgeway, In: Rodriguez R L, Denhardt D T, ed. Vectors: A survey of molecular cloning vectors and their uses. Stoneham: Butterworth, 467 492, 1988; Nicolas and Rubenstein, In: Vectors: A survey of molecular cloning vectors and their uses, Rodriguez & Denhardt (eds.), Stoneham: Butterworth, 493 513, 1988; Baichwal and Sugden, In: Gene Transfer, Kucherlapati R, ed., New York, Plenum Press, 117 148, 1986; Temin, In: gene Transfer, Kucherlapati (ed.), New York: Plenum Press, 149 188, 1986).

[0147] It is now widely recognized that DNA can be introduced into a cell using a variety of viral vectors. In various embodiments, expression constructs comprising viral vectors containing the genes of interest are adenoviral (see for example, U.S. Pat. No. 5,824,544; U.S. Pat. No. 5,707,618; U.S. Pat. No. 5,693,509; U.S. Pat. No. 5,670,488; U.S. Pat. No. 5,585,362; each incorporated herein by reference), retroviral (see for example, U.S. Pat. No. 5,888,502; U.S. Pat. No. 5,830,725; U.S. Pat. No. 5,770,414; U.S. Pat. No. 5,686,278; U.S. Pat. No. 4,861,719 each incorporated herein by reference), adeno-associated viral (see for example, U.S. Pat. No. 5,474,935; U.S. Pat. No. 5,139,941; U.S. Pat. No. 5,622,856; U.S. Pat. No. 5,658,776; U.S. Pat. No. 5,773,289; U.S. Pat. No. 5,789,390; U.S. Pat. No. 5,834,441; U.S. Pat. No. 5,863,541; U.S. Pat. No. 5,851,521; U.S. Pat. No. 5,252,479 each incorporated herein by reference), an adenoviral-adenoassociated viral hybrid (see for example, U.S. Pat. No. 5,856,152 incorporated herein by reference) or a vaccinia viral or a herpesviral (see for example, U.S. Pat. No. 5,879,934; U.S. Pat. No. 5,849,571; U.S. Pat. No. 5,830,727; U.S. Pat. No. 5,661,033; U.S. Pat. No. 5,328,688 each incorporated herein by reference) vector.

[0148] Non-viral gene transfer include calcium phosphate precipitation (Graham and Van Der Eb, Virology, 52:456-467, 1973; Chen and Okayama, Mol. Cell Biol., 7:2745-2752, 1987; Rippe et a., Mol. Cell Biol., 10:689-695, 1990) DEAE-dextran (Gopal, Mol. Cell Biol., 5:1188-1190, 1985), electroporation (Tur-Kaspa et a., Mol. Cell Biol., 6:716-718, 1986; Potter et a., Proc. Nat. Acad. Sci. USA, 81:7161-7165, 1984), direct microinjection (Harland and Weintraub, J. Cell Biol., 101:1094-1099, 1985.), DNA-loaded liposomes (Nicolau and Sene, Biochim. Biophys. Acta, 721:185-190, 1982; Fraley et a., Proc. Natl. Acad. Sci. USA, 76:3348-3352, 1979; Felgner, Sci Am. 276(6):102 6, 1997; Felgner, Hum Gene Ther. 7(15):1791 3, 1996), cell sonication (Fechheimer et a., Proc. Natl. Acad. Sci. USA, 84:8463-8467, 1987), gene bombardment using high velocity microprojectiles (Yang et a., Proc. Natl. Acad. Sci USA, 87:9568-9572, 1990), and receptor-mediated transfection (Wu and Wu, J. Biol. Chem., 262:4429-4432, 1987; Wu and Wu, Biochemistry, 27:887-892, 1988; Wu and Wu, Adv. Drug Delivery Rev., 12:159-167, 1993).

[0149] Liposomal delivery is also contemplated (Radler et a., Science, 275(5301):810 4, 1997). Also contemplated in the present invention are various commercial approaches involving “lipofection” technology. Complexing the liposome with a hemagglutinating virus (HVJ) facilitates fusion with the cell membrane and promotes cell entry of liposome-encapsulated DNA (Kaneda et a., Science, 243:375-378, 1989). In other exemplary embodiments, the liposome is complexed or employed in conjunction with nuclear nonhistone chromosomal proteins (HMG-1) (Kato et al., J. Biol. Chem., 266:3361-3364, 1991). In yet further embodiments, the liposome is complexed or employed in conjunction with both HVJ and HMG-1. In that such expression constructs have been successfully employed in transfer and expression of nucleic acid in vitro and in vivo, then they are applicable for the present invention.

[0150] Receptor-mediated gene targeting vehicles also are useful and generally consist of two components: a cell receptor-specific ligand and a DNA-binding agent. Several ligands have been used for receptor-mediated gene transfer. The most extensively characterized ligands are asialoorosomucoid (ASOR) (Wu and Wu, 1987, supra) and transferrin (Wagner et al., Proc. Nat'l. Acad Sci. USA, 87(9):3410-3414, 1990). Recently, a synthetic neoglycoprotein, which recognizes the same receptor as ASOR, has been used as a gene delivery vehicle (Ferkol et al., FASEB J., 7:1081-1091, 1993; Perales et al., Proc. Natl. Acad. Sci., USA 91:4086-4090, 1994) and epidermal growth factor (EGF) has also been used to deliver genes to squamous carcinoma cells (Myers, EPO 0273085).

[0151] In another embodiment of the invention, the expression construct simply consists of naked recombinant DNA or plasmids. Transfer of the construct is performed by any of the methods mentioned above which physically or chemically permeabilize the cell membrane. This is applicable particularly for transfer in vitro, however, it is also applied for in vivo use as well. Dubensky et al. (Proc. Nat. Acad. Sci. USA, 81:7529-7533, 1984; Benvenisty and Neshif (Proc. Nat. Acad. Sci. USA, 83:9551-9555, 1986). Naked DNA expression constructs also are transferred using particle bombardment (Klein et al., Nature, 327:70-73, 1987; Yang et al., Proc. Natl. Acad. Sci USA, 87:9568-9572, 1990).

[0152] Protein Purification

[0153] It is desirable to purify the LPLA2 proteins of the invention, for example, for use in the therapeutic methods of the present invention. Protein purification techniques are well known to those of skill in the art. These techniques involve, at one level, the crude fractionation of the cellular milieu to polypeptide and non-polypeptide fractions. Having separated the LPLA2 proteins/polypeptides of the invention from other proteins, the LPLA2 polypeptides of interest are further purified using chromatographic and electrophoretic techniques to achieve partial or complete purification (or purification to homogeneity). Analytical methods particularly suited to the preparation of a pure peptide are ion-exchange chromatography, exclusion chromatography; polyacrylamide gel electrophoresis; isoelectric focusing. A particularly efficient method of purifying peptides is fast protein liquid chromatography (FPLC) or even high performance liquid chromatography (HPLC). Exemplary HPLC conditions include those exemplified in Hiraoka et al., J Biol Chem 277, 10090-9, 2002.

[0154] Certain aspects of the present invention concern the purification, and in particular embodiments, the substantial purification, of an encoded polypeptide, protein or peptide. The term “purified polypeptide, protein or peptide” as used herein, is intended to refer to a composition, isolated from other components, wherein the polypeptide, protein or peptide is purified to any degree relative to its naturally-obtainable state. A purified polypeptide, protein or peptide therefore also refers to a polypeptide, protein or peptide, free from the environment in which it may naturally occur.

[0155] Generally, “purified” will refer to a polypeptide, protein or peptide composition that has been subjected to fractionation to remove various other components, and which composition substantially retains its expressed biological activity. Where the term “substantially purified” is used, this designation refers to a composition in which the polypeptide, protein or peptide forms the major component of the composition, such as constituting about 50%, about 60%, about 70%, about 80%, about 90%, about 95% or more of the proteins in the composition.

[0156] Various techniques suitable for use in protein purification well known to those of skill in the art. These include, for example, precipitation with ammonium sulphate, PEG, antibodies and the like or by heat denaturation, followed by centrifugation; chromatography steps such as ion exchange, gel filtration, reverse phase, hydroxylapatite and affinity chromatography; isoelectric focusing; gel electrophoresis; and combinations of such and other techniques. As is generally known in the art, it is believed that the order of conducting the various purification steps is interchangeable, or that certain steps are omitted, and still result in a suitable method for the preparation of a substantially purified polypeptide, protein or peptide.

[0157] Gene Therapy

[0158] Delivery of a therapeutic protein to appropriate cells can be effected via gene therapy ex vivo, in situ, or in vivo by use of any suitable approach known in the art, including by use of physical DNA transfer methods (e.g., liposomes or chemical treatments) or by use of viral vectors (e.g., adenovirus, adeno-associated virus, or a retrovirus). For example, for in vivo therapy, a nucleic acid encoding LPLA2, either alone or in conjunction with a vector, liposome, or precipitate may be injected directly into the subject, and in some embodiments, may be injected at the site where the expression of the LPLA2 compound is desired. For ex vivo treatment, the subject's cells are removed, the nucleic acid is introduced into these cells, and the modified cells are returned to the subject either directly or, for example, encapsulated within porous membranes which are implanted into the patient. See, e.g. U.S. Pat. Nos. 4,892,538 and 5,283,187. There are a variety of techniques available for introducing nucleic acids into viable cells. The techniques vary depending upon whether the nucleic acid is transferred into cultured cells in vitro, or in vivo in the cells of the intended host. Techniques suitable for the transfer of nucleic acid into mammalian cells in vitro include the use of liposomes, electroporation, microinjection, cell fusion, DEAE-dextran, and calcium phosphate precipitation. A commonly used vector for ex vivo delivery of a nucleic acid is a retrovirus.

[0159] Other in vivo nucleic acid transfer techniques include transfection with viral vectors (such as adenovirus, Herpes simplex I virus, or adeno-associated virus) and lipid- based systems. The nucleic acid and transfection agent are optionally associated with a microparticle. Exemplary transfection agents include calcium phosphate or calcium chloride co-precipitation, DEAE-dextran-mediated transfection, quaternary ammonium amphiphile DOTMA ((dioleoyloxypropyl) trimethylammonium bromide, commercialized as Lipofectin by GIBCO-BRL))(Felgner et al, (1987) Proc. Natl. Acad. Sci. USA 84, 7413-7417; Malone et al. (1989) Proc. Natl Acad. Sci. USA 86 6077-6081); lipophilic glutamate diesters with pendent trimethylammonium heads (Ito et al. (1990) Biochem. Biophys. Acta 1023, 124-132); the metabolizable parent lipids such as the cationic lipid dioctadecylamido glycylspermine (DOGS, Transfectam, Promega) and dipalmitoylphosphatidyl ethanolamylspermine (DPPES)(J. P. Behr (1986) Tetrahedron Lett. 27, 5861-5864; J. P. Behr et al. (1989) Proc. Natl. Acad. Sci. USA 86, 6982-6986); metabolizable quaternary ammonium salts (DOTB, N-(1-[2,3-dioleoyloxy]propyl)-N,N,N-trimethylammonium methylsulfate (DOTAP)(Boehringer Mannheim), polyethyleneimine (PEI), dioleoyl esters, ChoTB, ChoSC, DOSC)(Leventis et al. (1990) Biochim. Inter. 22, 235-241); 3beta[N-(N′, N′-dimethylaminoethane)-carbamoyl]cholesterol (DC-Chol), dioleoylphosphatidyl ethanolamine (DOPE)/3beta[N-(N′,N′-dimethylaminoethane)-carbamoyl]cholesterolDC-Chol in one to one mixtures (Gao et al., (1991) Biochim. Biophys. Acta 1065, 8-14), spermine, spermidine, lipopolyamines (Behr et al., Bioconjugate Chem, 1994, 5: 382-389), lipophilic polylysines (LPLL) (Zhou et al., (1991) Biochim. Biophys. Acta 939, 8-18), [[(1,1,3,3-tetramethylbutyl)cre-soxy]ethoxy]ethyl]dimethylbe nzylammonium hydroxide (DEBDA hydroxide) with excess phosphatidylcholine/cholesterol (Ballas et al., (1988) Biochim. Biophys. Acta 939, 8-18), cetyltrimethylammonium bromide (CTAB)/DOPE mixtures (Pinnaduwage et al, (1989) Biochim. Biophys. Acta 985, 33-37), lipophilic diester of glutamic acid (TMAG) with DOPE, CTAB, DEBDA, didodecylammonium bromide (DDAB), and stearylamine in admixture with phosphatidylethanolamine (Rose et al., (1991) Biotechnique 10, 520-525), DDAB/DOPE (TransfectACE, GIBCO BRL), and oligogalactose bearing lipids. Exemplary transfection enhancer agents that increase the efficiency of transfer include, for example, DEAE-dextran, polybrene, lysosome-disruptive peptide (Ohmori N I et al, Biochem Biophys Res Commun Jun. 27, 1997;235(3):726-9), chondroitan-based proteoglycans, sulfated proteoglycans, polyethylenimine, polylysine (Pollard H et al. J Biol Chem, 1998 273 (13):7507-1 1), integrin-binding peptide CYGGRGDTP, linear dextran nonasaccharide, glycerol, cholesteryl groups tethered at the 3′-terminal internucleoside link of an oligonucleotide (Letsinger, R. L. 1989 Proc Natl Acad Sci USA 86: (17):6553-6), lysophosphatide, lysophosphatidylcholine, lysophosphatidylethanolamine, and 1-oleoyl lysophosphatidylcholine.

[0160] In some situations it may be desirable to deliver the nucleic acid with an agent that directs the nucleic acid-containing vector to target cells. Such “targeting” molecules include antibodies specific for a cell-surface membrane protein on the target cell, or a ligand for a receptor on the target cell. Where liposomes are employed, proteins which bind to a cell-surface membrane protein associated with endocytosis may be used for targeting and/or to facilitate uptake. Examples of such proteins include capsid proteins and fragments thereof tropic for a particular cell type, antibodies for proteins which undergo internalization in cycling, and proteins that target intracellular localization and enhance intracellular half-life. In other embodiments, receptor-mediated endocytosis can be used. Such methods are described, for example, in Wu et al., 1987 or Wagner et al., 1990. For review of the currently known gene marking and gene therapy protocols, see Anderson 1992. See also WO 93/25673 and the references cited therein. For additional reviews of gene therapy technology, see Friedmann, Science, 244: 1275-1281 (1989); Anderson, Nature, supplement to vol. 392, no 6679, pp. 25-30 (1998); Verma, Scientific American: 68-84 (1990); and Miller, Nature, 357: 455460 (1992).

### Methods of Determining Enzymatic Activity of LPLA2

[0161] As indicated above, the LPLA2 proteins of used herein have transacylase activity. Such an enzyme activity is readily determined using assays known to those of skill in the art. As the LPLA2 proteins is generally specific for PE and PC, the substrates in any transacylase enzyme assay comprise, for example, one or both of these phospholipids. In one aspect, in an exemplary general assay, liposomes comprising dioleoylphosphatidylcholine (60.5 mol %), PE (27.3 mol %) and dicetyl phosphate (12.3 mol %) are used as the acyl group donor for the enzyme being tested. In exemplary assays, such liposomes are formed by mixing constituent lipids in chloroform and drying the mixture under a stream of nitrogen. Fifty mM sodium citrate (pH 4.5) is added to the dried lipids at a volume of 1 ml/128 nmol of lipid phosphorus. The lipids are caused to disperse into the buffer for 8 min in an ice-water bath using a probe sonicator. This procedure creates donor liposomes for the enzyme assay. Those skilled in the art understand that similar liposome commercially available.

[0162] Donor liposomes containing e.g., 64 nmol of phospholipid are incubated with 10 nmol of N-acetylsphingosine (NAS) or 5 nmol of [3H]NAS (10,000 cpm), 5 μg of bovine serum albumin, and LPLA2 protein containing preparation at 37° C. in a total volume of 500 μl of 40 mM sodium citrate (pH 4.5). The reaction is terminated by adding 3 ml of chloroform/methanol (2:1) plus 0.3 ml of 0.9% (w/v) NaCl. After centrifugation for 5 min at 800×g, the lower layer is transferred into another glass tube and dried down under a stream of nitrogen gas. The lipid extract is then analyzed using e.g., high performance applied thin layer chromatography (HPTLC) to confirm the presence of 1-O-acyl-N-acetylsphingosine (1-O-acyl-NAS). In exemplary embodiments, the HPTLC plate and developed in a solvent system consisting of chloroform/acetic acid (9:1). Of course the lipid catabolism also is readily analyzed using other techniques, such as gas chromatography, HPLC and the like.

[0163] In an exemplary embodiment, an HPTLC assay is performed using nonradioactive NAS, the TLC plate is dried, sprayed with 8% (w/v) CuSO4 pentahydrate in water/methanol/concentrated H3PO4 (60:32:8), and charred for 15 min at 150° C. An image of the plate is taken by a scanner (UMAX Astra Scanner 2200) connected to a computer and scanned by the NIH Image program (Version 1.62) to estimate the density of each band. Known amounts of ceramide are used to obtain a standard curve. In an exemplary assay using radioactive NAS, 1-O-acyl-NAS is detected under a UV light with primulin spray, scraped, and counted. Other assays for enzyme activity are known to those of skill in the art and are readily adapted to determine whether a given LPLA2 variant or fragment possesses the requisite transacylase or phospholipase activity.

[0164] In addition to the above in vitro enzyme assays, those skilled in the art also test the enzymatic activity of any of the LPLA2 protein compositions described herein by determining the presence of tingible body macrophages in a sample prior to and after contacting the sample with the LPLA2 protein. Any of the above assays also are used to screen for potential therapeutics that decrease intracellular levels of tingible body macrophages.

### Methods of Screening for Modulators of LPLA2

[0165] The present invention also contemplates methods for identifying additional agents that decrease intracellular levels of tingible body macrophages through augmenting, increasing or otherwise stimulating the activity of LPLA2, or increasing or otherwise stimulating the expression of LPLA2.

[0166] In the screening assays of the present invention, the candidate substance may first be screened for basic biochemical activity—e.g., in vitro stimulation of LPLA2 activity, and then tested for its ability to reduce accumulation of intracellular tingible body macrophages. To test this effect, animal models exhibiting an accumulation of tingible body macrophages are known, e.g., LPLA2−/− knockout mouse model.

[0167] Other mouse models for macrophage defects known in the art are also suitable to test a candidate substance for its ability to reduce accumulation of intracellular tingible body macrophages. These models include, but are not limited to: the Ro mouse model (Xue et al., Proc Natl Acad Sci U S A 100: 7503-7508, 2003), the Tyro 3 mouse model (Lu et al., Science 293: 306-311, 2001), the c-mer mouse model (Cohen et a., J Exp Med 196: 135-140, 2002), and the MFG-E8 mouse model (Hanayama et a., Science 304: 1147-1150, 2004).

[0168] a. Binding Assays

[0169] Preliminarily, candidate substances can be identified by screening for molecules that bind to LPLA2. Binding of a molecule to a target may, in and of itself, be stimulatory, due to steric, allosteric or charge-charge interactions. In some aspects, this is performed in solution, in other aspects it is performed on a solid phase and is utilized as a first round screen to rapidly eliminate certain compounds before moving into more sophisticated screening assays. In one embodiment of this kind, the screening of compounds that bind to the LPLA2 of SEQ ID NO: 1 or a fragment thereof is provided.

[0170] The LPLA2 can be free in solution, fixed to a support, or expressed in or on the surface of a cell. Either the LPLA2 or the compound to be screened is labeled, thereby permitting determining of binding. One may measure the amount of free label versus bound label to determine binding.

[0171] A technique for high throughput screening of compounds is described in WO 94/03564. Large numbers of small peptide test compounds are synthesized on a solid substrate, such as plastic pins or some other surface. The peptide test compounds are reacted with, for example, LPLA2 and washed. Bound polypeptide is detected by various methods.

[0172] LPLA2 can be fixed to a support by coating directly onto plates, or by using non-neutralizing antibodies to immobilize the polypeptide to a solid phase. Alternatively, LPLA2 fusion proteins containing a reactive region (such as, for example, a terminal region) can be used to link the LPLA2 active region to a solid phase.

[0173] b. In vitro Assays

[0174] Assays for determining the ability of a candidate substance to augment, increase or otherwise stimulate LPLA2 activity generally include the steps of: i) contacting a LPLA2 of SEQ ID NOs: 1-288 with a candidate modulator; ii) monitoring the activity of said LPLA2; and iii) comparing the activity of LPLA2 in the presence and absence of said candidate substance; wherein an increase in the activity of said LPLA2 indicates that the candidate substance will augment, increase or otherwise stimulate LPLA2 activity. Exemplary assays for determining LPLA2 activity are discussed above in the section entitled “Methods of Determining Enzymatic Activity of LPLA2.”

[0175] Significant changes in activity and/or expression include those that are represented by alterations in activity of at least about 30%-40%, and in some aspects, by changes of at least about 50%, with higher values of course being possible.

[0176] Alternatively, the candidate substance is added to isolated peritoneal macrophages, e.g. macrophages from a animal model of lupus, and the number or phagocytic index of tingible body macrophages is determined in the presence and absence of the added candidate substance.

[0177] C. In vivo Assays

[0178] The present invention particularly contemplates the use of various animal models. As discussed above, there is a LPLA2−/− knockout mouse model. Other animal models of lupus are also known in the art, for example, the Ro mouse model, the Tyro 3 mouse model, the c-mer mouse model, and the MFG-E8 mouse model.

[0179] Treatment of these animals with test compounds will involve the administration of the compound, in an appropriate form, to the animal. Administration will be by any route that could be utilized for clinical or non-clinical purposes, including but not limited to oral, nasal, buccal, or even topical. Alternatively, administration is by intratracheal instillation, bronchial instillation, intradermal, subcutaneous, intramuscular, intraperitoneal or intravenous injection. Specifically contemplated are intravenous and other mechanisms for delivery of the candidate substance locally to lymphatic tissue.

[0180] Determining the effectiveness of a compound in vivo may involve a variety of different criteria. Such criteria include, but are not limited to, clearance of apoptotic bodies, reduction in accumulation of tingible body macrophages, survival, reduction of SLE-associated signs, symptoms or complications, and improvement of general physical state including activity. It also is possible to perform histologic studies on tissues from these mice, or to examine the molecular and morphological state of the cells, which includes cell size, other morphological indicators or alteration in the expression of genes involved in SLE disorders.

[0181] In the in vivo screening assays of the present invention, the compound is administered to a model animal, over period of time and in various dosages, and an alleviation of the accumulation of tingible body macrophages and associated lupus-like symptoms are monitored. Any improvement in one or more of these symptoms will be indicative of the candidate substance being a useful modulator.

[0182] d. Screening for Increased Expression of LPLA2

[0183] Candidate substances are screened for their ability to increase expression of LPLA2 using techniques known in the art. For example, cells that normally express LPLA2, or cells that do not normally express LPLA2 are contacted with a candidate substance for a period of time, and levels of LPLA2 mRNA are monitored, e.g. using quantitative PCR methods.

[0184] e. Candidate Substances

[0185] As used herein the term “candidate substance” refers to any molecule that may potentially act as a modulator of the LPLA2 of the present invention. In certain aspects, the candidate substance is a protein or fragment thereof, a small molecule inhibitor, or even a nucleic acid molecule. In other aspects, the candidate substance is a non-specific transcription factor, an upstream activator in a LPLA2 cascade, an inhibitor of a LPLA2 inhibitor, an inhibitor of a silencer (i.e., a DNA binding protein that inhibits transcription) or gene therapy that replaces a natural LPLA2 promoter with a more active promoter. Rational drug design includes not only comparisons with known modulators of phospholipases, but predictions relating to the structure of target molecules. Alternatively, rapid and efficient screening of entire libraries of unrelated or related organic chemical compounds, or combinatorially generated libraries (e.g., peptide libraries), is possible. Combinatorial approaches also lend themselves to rapid evolution of potential drugs by the creation of second, third and fourth generation compounds related to the first.

[0186] Compounds isolated from natural sources, such as animals, bacteria, fungi, plant sources, including leaves and bark, and marine samples are assayed as candidates for the presence of potentially useful pharmaceutical agents. It will be understood that the pharmaceutical agents to be screened could also be derived or synthesized from chemical compositions or man-made compounds. Thus, it is understood that the candidate substance identified by the present invention is a polypeptide, apolynucleotide, a small molecule inhibitor or any other compound that is designed through rational drug design starting from a known activator of a phospholipase A2 activity.

[0187] In some aspects of the invention, the candidate substance is a variant of LPLA2 prepared as described above. Such a variant is readily tested for increased LPLA2 activity using any of the assays described herein. In other aspects of the invention, the candidate substance is an anti-idiotypic antibodies of LPLA2. Anti-idiotypes are generated by producing antibodies specific for a given protein and then using such an antibody as an antigen to produce the anti-idiotypic antibody. As a mirror image of a mirror image, the binding site of anti-idiotype is an analog of the original antigen. Methods of making antibodies to antigens such as LPLA2 are known to those of ordinary skill in the art, and are disclosed, e.g., in Sambrook et al. (2000) and Harlow and Lane (1988). Anti-idiotypic antibodies can be generated by methods known in the art, including, e.g., Greenspan et al., FASEB. J., 7:437 (1993).

[0188] Diagnostic Methods

[0189] The invention also provides methods for diagnosing systemic lupus erythematosus, determining susceptibility to systemic lupus erythematosus, and monitoring progression of systemic lupus erythematosus. Such methods involve assaying body fluid, cells, or tissue samples from patients for the presence or absence of LPLA2 autoantibodies or for reduced or normal LPLA2 expression or activity, wherein the presence of LPLA2 autoantibodies suggests diagnosis of or susceptibility to disease, and wherein a reduced LPLA2 expression or activity suggests diagnosis of or susceptibility to disease.

[0190] Examples of body fluid samples include blood, serum, plasma, pleural fluid, pulmonary or bronchial lavage fluid, synovial fluid, peritoneal fluid, bone marrow aspirate, lymph, cerebrospinal fluid, ascites fluid, amniotic fluid, sputum, bladder washes, semen, urine, saliva, and tears. Examples of cells include white blood cells, B- or T- lymphocytes, peritoneal lymphocytes, macrophages or dendritic cells. Examples of tissues include biopsies from spleen, kidney, lung, lymph nodes or blood vessels. Suitable assay methods are well known in the art and illustrated in the examples herein.

[0191] In one aspect, such methods comprise determining lysosomal phospholipase A2 (LPLA2) enzymatic activity in a sample from an individual. The enzymatic activity levels of the patient can be compared to those of a normal individual, or alternatively can be compared to previous LPLA2 enzymatic activity levels from the same individual. Detection of LPLA2 enzymatic activity that is decreased in the individual compared to LPLA2 enzymatic activity in a normal individual (wherein said normal individual is known not to suffer from SLE), is suggestive of the diagnosis of SLE or systemic lupus erythematosus, and/or susceptibility to SLE or systemic lupus erythematosus. Detection of LPLA2 enzymatic activity that is decreased in the individual compared to a prior determination of LPLA2 enzymatic activity in the same individual is also suggestive of the diagnosis of SLE or systemic lupus erythematosus and/or susceptibility to SLE or systemic lupus erythematosus.

[0192] In another aspect, such methods comprise determining LPLA2 expression in cells or tissue from an individual. The LPLA2 expression levels of the patient can be compared to those of a normal individual, or alternatively can be compared to previous LPLA2 expression levels from the same individual. Detection of LPLA2 expression level that is decreased in the individual compared to LPLA2 expression level in a normal individual (wherein said normal individual is known not to suffer from SLE), is suggestive of the diagnosis of SLE or systemic lupus erythematosus and/or susceptibility to SLE or systemic lupus erythematosus. Detection of LPLA2 expression level that is decreased in the individual compared to a prior LPLA2 expression level in the same individual is also suggestive of the diagnosis of SLE or systemic lupus erythematosus and/or susceptibility to SLE or systemic lupus erythematosus.

[0193] In yet another aspect, such methods comprise detecting lysosomal phospholipase A2 (LPLA2) autoantibodies in a sample from an individual. Detecting increased LPLA2 autoantibodies in the individual compared to LPLA2 autoantibodies in a normal individual (wherein said normal individual is known not to suffer from SLE) is suggestive of the diagnosis of SLE or systemic lupus erythematosus and/or susceptibility to SLE or systemic lupus erythematosus. Detecting increased LPLA2 autoantibodies in a sample from an individual compared to prior levels of LPLA2 autoantibodies in the same individual is suggestive of the diagnosis of SLE or systemic lupus erythematosus and/or susceptibility to SLE or systemic lupus erythematosus.

[0194] In further aspects, the invention provides mehods of monitoring progression of SLE or systemic lupus erythematosus or rheumatoid arthritis in an individual. Such methods comprise periodic determination of levels of LPLA2 enzymatic activity, or levels of LPLA2 expression, or levels of LPLA2 autoantibodies, in samples taken from the individual over time. Levels can be measured every week, two weeks, three weeks, or monthly, or every 2, 3, 4, 5, 6, or 12 months. Decreasing levels of of LPLA2 enzymatic activity over time, or decreasing levels of LPLA2 expression over time, or increasing levels of LPLA2 autoantibodies over time are suggestive of progression of systemic lupus erythematosus.

[0195] In related aspects, the invention provides methods of monitoring effectiveness of drug therapy of SLE or systemic lupus erythematosus or rheumatoid arthritis. In some embodiments, the methods involve monitoring levels of exogenously administered LPLA2 enzyme, or fragment, variant or derivative thereof. In other embodiments, such methods comprise periodic determination of levels of LPLA2 enzymatic activity, or levels of LPLA2 expression, or levels of LPLA2 autoantibodies, in samples taken from the individual over time. Levels can be measured every week, two weeks, three weeks, or monthly, or every 2, 3, 4, 5, 6, or 12 months. Increasing levels of of LPLA2 enzymatic activity over time, or increasing levels of LPLA2 expression over time, or decreasing levels of LPLA2 autoantibodies over time are suggestive of therapeutic efficacy.

[0196] Alternatively, such methods involve determining the presence or absence of a polymorphism in the LPLA2 gene that results in reduced expression or activity, wherein the presence of such a polymorphism suggests diagnosis of or susceptibility to disease. Such methods may optionally involve amplifying the DNA or RNA from the sample. Such methods may be carried out by any means known in the art, including (a) hybridizing the DNA or RNA with an oligonucleotide probe and detecting hybridization; (b) electrophoretic analysis; (c) restriction fragment length polymorphism analysis; and (d) nucleotide sequence analysis. For hybridization, the probe is contacted with DNA from the sample under conditions that are sufficient to allow specific hybridization of the nucleic acid probe. “Specific hybridization”, as used herein, indicates exact hybridization (e.g., with no mismatches). Specific hybridization can be performed under high stringency conditions or moderate stringency conditions, preferably high stringency. See Current Protocols in Molecular Biology, Ausubel, F. et al., eds., John Wiley & Sons. Alternatively, the probe is contacted with RNA from the sample under specific hybridization conditions, to identify the presence of a polymorphism or a particular splicing variant. Mutation analysis by restriction digestion can be used to detect a polymorphism(s), if the mutation or polymorphism in the nucleic acid results in the creation or elimination of a restriction site. DNA, possibly including flanking sequences, is amplified and digested with a restriction enzyme that cleaves at the restriction site that has been created or eliminated by the polymorphism. RFLP analysis is conducted as known in the art (see Current Protocols in Molecular Biology, supra). The digestion pattern of the relevant DNA fragment indicates the presence or absence of the polymorphism. Sequencing of the relevant DNA or RNA, and comparison with normal gene sequence, can also be used to detect polymorphisms Dot-blot hybridization of amplified DNA or RNA with allele-specific oligonucleotide (ASO) probes (see, for example, Saiki, R. et al., Nature 324:163-166 (1986)) is also known in the art. An “allele-specific oligonucleotide” (also referred to herein as an “allele-specific oligonucleotide probe”) is an oligonucleotide of approximately 10-50 base pairs, for example, approximately 15-30 base pairs, that specifically hybridizes to a gene containing a polymorphism associated with disease.

### Methods of Treating Autoimmune Disorders

[0197] As described herein throughout, it has been discovered that LPLA2 proteins are used to improve the clearance of apoptotic bodies and/or reduce accumulation of intracellular tingible body macrophages. As such, the invention provides any LPLA2 of SEQ ID NO: 1-288, or a fragment, variant or derivative that retains the desired biological activity for use in the treatment of any disorder displaying the symptom of accumulation of tingible body macrophages. In a related aspect, the invention provides methods of treatment using agents that decrease intracellular levels of tingible body macrophages through augmenting, increasing or otherwise stimulating the activity of LPLA2, or increasing or otherwise stimulating the expression of LPLA2.

[0198] In certain aspects, the methods of the invention are useful in the treatment of SLE, including systemic lupus erythematosus, drug-induced lupus, neonatal lupus, and cutaneous lupus. However, it should be understood that in one aspect, the methods of the invention are useful in the treatment of any and all disorders that manifest in the accumulation of intracellular tingible body macrophages, including other autoimmune disorders such as rheumatoid arthritis. The invention also specifically contemplates use of any of the therapeutic agents described herein in the preparation of a medicament for the treatment of the above-described disorders.

[0199] To achieve the appropriate therapeutic outcome, either by administration of the LPLA2-related compositions alone or in combination with other therapeutic modalities, one generally administers to the subject the therapeutic protein composition in an effective amount. “Effective amount” is an amount effective to produce the desired therapeutic outcome reproducibly, i.e., an alleviation of one or more of the signs or symptoms or complications of the disease.

[0200] Administration of these compositions according to the present invention will be via any route so long as the target tissue is available via that route. However, other conventional routes of administration, e.g., parenterally, subcutaneous, intravenous, intradermal, intramuscular, intramammary, intraperitoneal, intrathecal, intraocular, retrobulbar, intrapulmonary, intratracheal instillation, bronchial instillation, aerosol, sublingual, oral, nasal, anal, vaginal, or transdermal delivery, or by surgical implantation at a particular site. Specifically contemplated are intravenous and other mechanisms for delivery of the candidate substance locally to lymphatic tissue.

[0201] The treatment may consist of a single dose or a plurality of doses over a period of time. Administration of the compositions can be systemic or local, and may comprise a single site injection or infusion of a therapeutically-effective amount of the LPLA2 protein composition. Alternatively, it is contemplated that the therapeutic composition may be delivered to the patient at multiple sites. The multiple administrations may be rendered simultaneously or may be administered over a period of time. Additional therapy may be administered on a period basis, for example, daily, weekly, or monthly.

[0202] In certain embodiment, parenteral administration of the therapeutic compounds is carried out with an initial bolus followed by continuous infusion to maintain therapeutic circulating levels of drug product. Those of ordinary skill in the art will readily optimize effective dosages and administration regimens as determined by good medical practice and the clinical condition of the individual patient.

[0203] The frequency of dosing will depend on the pharmacokinetic parameters of the agents and the routes of administration. Depending on the route of administration, a suitable dose is calculated according to body weight, body surface areas or organ size. The availability of animal models is particularly useful in facilitating a determination of appropriate dosages of a given therapeutic. In one aspect, the dosage is determined using an animal model, such as the LPLA2−/− knockout mouse model described herein, and modified and adapted to use in higher mammals.

[0204] Further refinement of the calculations necessary to determine the appropriate treatment dose is routinely made by those of ordinary skill in the art without undue experimentation. The final dosage regimen will be determined by the attending physician, considering factors which modify the action of drugs, e.g., the drug's specific activity, severity of the damage and the responsiveness of the patient, the age, condition, body weight, sex and diet of the patient, the severity of any infection, time of administration, kind of concurrent treatment, if any, frequency of treatment, and the nature of the effect desired, and other clinical factors. As studies are conducted, further information will emerge regarding appropriate dosage levels and duration of treatment for specific diseases and conditions.

[0205] In certain embodiments, the compositions are administered alone, in other embodiments the compositions are administered in conjunction with other therapeutics directed to the disease or directed to other symptoms thereof. Dosage levels of the order from about 0.01 mg to 30 mg per kilogram of body weight per day, for example from about 0.1 mg to 10 mg/kg.

[0206] It will be appreciated that the pharmaceutical compositions and treatment methods of the invention are useful in fields of human medicine and veterinary medicine. Thus the subject to be treated is a mammal, such as a human or other mammalian animal. For veterinary purposes, subjects include for example, farm animals including cows, sheep, pigs, horses and goats, companion animals such as dogs and cats, exotic and/or zoo animals, laboratory animals including mice rats, rabbits, guinea pigs and hamsters; and poultry such as chickens, turkey ducks and geese. The patient being treated is of any age, for example, between the ages of 10-50 years, age 20 or less, or age 10 or less.

[0207] In addition, it is contemplated that the peptide/protein-based compositions of the present invention are used in combination with any present treatments for disorders associated with an abnormal accumulation of tingible body macrophages. For example, in certain embodiments, it is contemplated that the methods of the invention are useful in combination with known SLE therapy. Compositions comprising LPLA2, or a fragment, variant or derivative thereof, are administered before, after or during such therapy.

[0208] Combination therapy with other agents or drugs for treating SLE include, but are not limited to, anti-inflammatory drugs (NSAIDs) such as aspirin, ibuprofen (Motrin), naproxen (Naprosyn) and sulindac (Clinoril), cyclooxygenase-2 (COX-2) inhibitors including Celecoxib (Celebrex), rofecoxib (Vioxx), valdecoxib (Bextra) and Meloxicam (Mobicox), corticosteroids such as prednisone, hydrocortisone, methylprednisolone, and dexamethasone, hydroxychlooquine (Plaquenil), mycophenolate mofetil (Cellcept), chloroquine (Aralen), quinacrine, rituximab (Rituxan), dapsone, retinoic acid (Retin-A), plasmapheresis, cytotoxic drugs such as methotrexate (Rheumatrex, Trexall), azathioprine (Imuran), cyclophosphamide (Cytoxan), chlorambucil (Leukeran), and cyclosporine (Sandimmune) and the costimulation blocker CTLA41G. The combined therapies contemplated herein, i.e., combinations of LPLA2-based compositions with SLE drugs are, in one aspect, administered in a combined amount effective to produce a decrease in the accumulation of tingible body macrophages. Such a combined administration in some aspects alleviates one or more signs, symptoms or complications that are associated with an accumulation of intracellular tingible body macrophages.

### Pharmaceutical Compositions

[0209] Pharmaceutical compositions for administration according to the present invention can comprise at least one LPLA2-derived protein (e.g., a protein of SEQ ID NOs: 1-288, a variant or derivative thereof or any other LPLA2-derived protein that stimulates the catabolism of tingible body macrophages). The pharmaceutical compositions also include another agent that is used for the treatment of SLE, e.g., NSAIDs, corticosteroids or cytotoxic agents. Each of these preparations is in some aspects provided in a pharmaceutically acceptable form optionally combined with a pharmaceutically acceptable carrier. These compositions are preferably sterile and may be administered by any methods that achieve their intended purposes.

[0210] The instant compositions can be formulated for various routes of administration, for example, by oral administration, by transmucosal administration (including pulmonary and nasal administration), parenteral administration (including subcutaneous administration), transdermal (topical) administration or by rectal administration, as well as intrathecal, intravenous, intramuscular, intraperitoneal, intranasal, intraocular or intraventricular injection. The compound or compounds of the instant invention can also be administered in a local rather than a systemic fashion, such as injection as a sustained release formulation.

[0211] The optimal pharmaceutical formulation will be determined by one of skill in the art depending on the route of administration and the desired dosage. Such formulations may influence the physical state, stability, rate of in vivo release and rate of in vivo clearance of the administered agents.

[0212] Besides those representative dosage forms described herein, pharmaceutically acceptable excipients and carriers are generally known to those skilled in the art and are thus included in the instant invention. Such excipients and carriers are described, for example, in “Remingtons Pharmaceutical Sciences” Mack Pub. Co., New Jersey

[0213] Injectable dosage forms for parenteral administration generally include aqueous suspensions or oil suspensions, which may be prepared using a suitable dispersant or wetting agent and a suspending agent. Generally, this will entail preparing compositions that are essentially free of pyrogens, as well as other impurities that could be harmful to humans or animals. Injectable forms may be in solution phase or provided as a lyophilized powder suitable for reconstitution as a solution. Both are prepared with a solvent or diluent. Acceptable solvents or vehicles include sterilized water, Ringer's solution, or an isotonic aqueous saline solution. Alternatively, sterile oils may be employed as solvents or suspending agents. Typically, the oil or fatty acid is non-volatile, including natural or synthetic oils, fatty acids, mono-, di- or tri-glycerides. For injection, the formulations may optionally contain stabilizers, pH modifiers, surfactants, bioavailability modifiers and combinations of these. The compounds may be formulated for parenteral administration by injection such as by bolus injection or continuous infusion. A unit dosage form for injection may be in ampoules or in multi-dose containers.

[0214] The formulations of the invention may be designed to be short-acting, fast- releasing, long-acting, and sustained-releasing as described below. Thus, the pharmaceutical formulations may also be formulated for controlled release or for slow release. The instant compositions may also comprise, for example, micelles or liposomes, or some other encapsulated form, or may be administered in an extended release form to provide a prolonged storage and/or delivery effect. Therefore, the pharmaceutical formulations may be compressed into pellets or cylinders and implanted intramuscularly or subcutaneously as depot injections or as implants such as stents. Such implants may employ known inert materials such as silicones and biodegradable polymers.

[0215] Any of the above dosage forms containing effective amounts are well within the bounds of routine experimentation and therefore, well within the scope of the instant invention.

[0216] Compositions within the scope of this invention include all compositions comprising at least one LPLA2-derived protein according to the present invention in an effective amount. In some aspects, such treatment will result in an alleviation of one or more signs or symptoms or complications of SLE discussed above.

[0217] One will generally desire to employ appropriate salts and buffers to render the compositions stable and allow for uptake of the compositions at the target site. Generally the protein compositions of the invention are provided in lyophilized form to be reconstituted prior to administration. Buffers and solutions for the reconstitution of the therapeutic agents may be provided along with the pharmaceutical formulation to produce aqueous compositions of the present invention for administration. Such aqueous compositions will comprise an effective amount of each of the therapeutic agents being used, dissolved or dispersed in a pharmaceutically acceptable carrier or aqueous medium. The phrase “pharmaceutically or pharmacologically acceptable” refer to molecular entities and compositions that do not produce adverse, allergic, or other untoward reactions when administered to an animal or a human. As used herein, “pharmaceutically acceptable carrier” includes any and all solvents, dispersion media, coatings, antibacterial and antifungal agents, isotonic and absorption delaying agents and the like. The use of such media and agents for pharmaceutically active substances is well known in the art. Except insofar as any conventional media or agent is incompatible with the therapeutic compositions, its use in therapeutic compositions is contemplated. Supplementary active ingredients also are incorporated into the compositions.

[0218] Methods of formulating proteins and peptides for therapeutic administration also are known to those of skill in the art. In certain embodiments, the active compounds are prepared for administration as solutions of free base or pharmacologically acceptable salts in water suitably mixed with a surfactant, such as hydroxypropylcellulose. Dispersions also are prepared in glycerol, liquid polyethylene glycols, and mixtures thereof and in oils. Under ordinary conditions of storage and use, these preparations contain a preservative to prevent the growth of microorganisms.

[0219] The pharmaceutical forms suitable for injection include sterile aqueous solutions or dispersions and sterile powders for the extemporaneous preparation of sterile injectable solutions or dispersions. In all cases the form must be sterile and must be fluid to the extent that easy syringability exists. It must be stable under the conditions of manufacture and storage and must be preserved against the contaminating action of microorganisms, such as bacteria and fungi. In some aspects, the carrier is a solvent or dispersion medium containing, for example, water, ethanol, polyol (for example, glycerol, propylene glycol, and liquid polyethylene glycol, and the like), suitable mixtures thereof, and vegetable oils. The proper fluidity is maintained, for example, by the use of a coating, such as lecithin, by the maintenance of the required particle size in the case of dispersion and by the use of surfactants. The prevention of the action of microorganisms is brought about by various antibacterial and antifungal agents, for example, parabens, chlorobutanol, phenol, sorbic acid, thimerosal, and the like. In many cases, it will be preferable to include isotonic agents, for example, sugars or sodium chloride. Prolonged absorption of the injectable compositions is brought about by the use in the compositions of agents delaying absorption, for example, aluminum monostearate and gelatin.

[0220] Sterile injectable solutions are prepared by incorporating the active compounds in the required amount in the appropriate solvent with various of the other ingredients enumerated above, as required, followed by filtered sterilization. Generally, dispersions are prepared by incorporating the various sterilized active ingredients into a sterile vehicle which contains the basic dispersion medium and the required other ingredients from those enumerated above. In the case of sterile powders for the preparation of sterile injectable solutions, the methods of preparation are vacuum-drying and freeze-drying techniques which yield a powder of the active ingredient plus any additional desired ingredient from a previously sterile-filtered solution thereof.

[0221] In some aspects, the compositions of the present invention are formulated in a neutral or salt form. Pharmaceutically-acceptable salts include the acid addition salts (formed with the free amino groups of the protein) and which are formed with inorganic acids such as, for example, hydrochloric or phosphoric acids, or such organic acids as acetic, oxalic, tartaric, mandelic, and the like. Salts formed with the free carboxyl groups also are derived from inorganic bases such as, for example, sodium, potassium, ammonium, calcium, or ferric hydroxides, and such organic bases as isopropylamine, trimethylamine, histidine, procaine and the like.

[0222] Upon formulation, solutions will be administered in a manner compatible with the dosage formulation and in such amount as is therapeutically effective. The formulations are easily administered in a variety of dosage forms such as injectable solutions, drug release capsules and the like. For parenteral administration in an aqueous solution, for example, the solution is suitably buffered if necessary and the liquid diluent first rendered isotonic with sufficient saline or glucose. These particular aqueous solutions are especially suitable for intravenous, intramuscular, subcutaneous and intraperitoneal administration.

[0223] “Unit dose” is defined as a discrete amount of a therapeutic composition dispersed in a suitable carrier.

[0224] The present invention also contemplates kits for use in the treatment of the intracellular accumulation of tingible body macrophages, e.g. SLE or systemic lupus erythematosus. Such kits include at least a first sterile composition comprising the proteins/peptides described above in a pharmaceutically acceptable carrier. Another component is optionally a second therapeutic agent for the treatment of the disorder along with suitable container and vehicles for administrations of the therapeutic compositions. The kits may additionally comprise solutions or buffers for suspending, diluting or effecting the delivery of the first and second compositions. The kits may further comprise catheters, syringes or other delivering devices for the delivery of one or more of the compositions used in the methods of the invention. The kits may further comprise instructions containing administration protocols for the therapeutic regimens.

[0225] The following examples are provided in order to demonstrate and further illustrate certain preferred embodiments and aspects of the present invention and are not to be construed as limiting the scope thereof.

### EXAMPLE 1

### Characterization of LPLA2−/− Knockout Mice

[0226] Double conditional gene targeting was employed to elucidate the function of LPLA2. LPLA2-deficient mice (LPLA2−/−) were generated by the systemic deletion of exon 5 of the LPLA2 gene, which encodes the lipase motif essential for the phospholipase A2 activity (Hiraoka, M., Abe, A., Lu, Y., Yang, K., Han, X., Gross, R. W., and Shayman, J. A. Mol Cell Biol 26, 6139-6148 2006). The survival of the LPLA2−/− mice was normal. LPLA2−/− mouse mating pairs yielded normal litter sizes, indicating that the gene deficiency did not impair fertility or fecundity. Alveolar macrophages from wild-type but not LPLA2−/− mice readily degraded radiolabeled phosphatidylcholine. By three months of age, a marked accumulation of phospholipids, in particular phosphatidylethanolamine and phosphatidylcholine, was found in the alveolar macrophages, the peritoneal macrophages and the spleens of LPLA2−/− mice. The ultrastructural examination of LPLA2−/− mouse alveolar and peritoneal macrophages revealed the appearance of foam cells with lamellar inclusion bodies, a hallmark of cellular phospholipidosis. This finding was not surprising since very high expression of LPLA2 mRNA and protein had been observed in alveolar macrophages, consistent with a role for LPLA2 in surfactant catabolism (Abe, A., Hiraoka, M., Wild, S., Wilcoxen, S. E., Paine, R., 3rd, and Shayman, J. A. J Biol Chem 279, 42605-42611 2004).

[0227] By six months of age the LPLA2 null mice began to develop signs of lymphoproliferation. Splenic enlargement was readily apparent as was adenopathy. By 18 months of age the spleens were greater than 10 times the weight of those obtained from the wild type mice and diffuse lymphadenopthy was readily apparent. Female mice demonstrated a significantly greater predilection toward increased organ weight than male mice. By 20 months of age the knockout mice displayed weight loss with signs of wasting as evidenced by loss of subcutaneous fat (FIG. 2). Histological analysis of the lymphoid organs revealed the presence of macrophages with a foam cell phenotype and the loss of stromal architecture (FIG. 3). Flow cytometric analysis of the splenic lymphocytes revealed a polyclonal expansion of both B and T cells.

[0228] Histological analysis of the kidneys of LPLA2−/− mice revealed the presence of an immune complex glomerulonephritis with a “full house” pattern of deposition. LPLA2−/− mice showed proliferative changes and loss of capillary loop patency, consistent with a proliferative glomerulonephritis. Corresponding transmission electron micrographs demonstrated foot process effacement, immune complex deposition, and the presence of electron dense apoptotic bodies. Immunofluorescence demonstrated increased Ig and C1q deposition in the glomeruli of the null (LPLA2−/−) verse wild type (LPLA2+/+) mice (FIG. 4A). By transmission electron microscopy, immune complex deposition was evident in various glomerular compartments including mesangial, subepithelial, and subendothelial regions. Serum immunoglobulin levels were markedly elevated in the older mice and anti-dsDNA titers were significantly elevated in an age dependent fashion (FIG. 4B) as was the presence of ANAs (FIG. 4C). The spleens were characterized by numerous enlarged macrophages and the presence of massive amounts of tingible bodies consistent with the inability to clear apoptotic cells (FIG. 4D). Frozen sections of KO LPLA2−/− mice spleens were stained for CD68 (red) and apoptotic bodes with a TUNEL stain (green) (FIG. 4D).

[0229] A primary mode of action of LPLA2 is the degradation of extracellular phospholipids to form free fatty acids and lyso-phosphatidylcholine and lyso-phospharidylethanomine. LPLA2 is secreted from macrophages following activation by ligand, subsequently binds to mannose receptors on the macrophage and is trafficed back to the lysosome. To assess uptake and co-localization of LPLA2 and lysosomes, macrophages from LPLA2−/− KO mice were treated with recombinant LPLA2, fixed and stained with an anti-LPLA2 monoclonal antibody (green) (FIG. 5A) or an antibody against the lysosomal marker LAMP-1 (red) (FIG. 5B). FIG. 5C shows an overlay of FIGS. 5A and 5B where yellow indicates co-localization of LPLA2 and the lysosome.

[0230] Additional changes in the 18 month and older mice included the development of renal insufficiency and proteinuria. FIG. 6 shows that 24 hour protein excretion is more than 2-fold elevated in the LPLA2−/− mice compared to wild type mice. Creatinine concentrations were also elevated in LPLA2−/− mice (0.63±0.22) versus the LPLA2+/+ mice (0.25±0.06).

### EXAMPLE 2

### Impaired Digestion of Apoptotic Bodies Can Be Recapitulated in Peritoneal Macrophages from LPLA2−/− Mice

[0231] In order to determine whether the appearance of apoptotic bodies within the spleens and glomeruli of LPLA2−/− knockout mice resulted from a generalized defect in the digestion of endocytosed apoptotic cells, a LPLA2 defect was recapitulated in vitro.

[0232] Peritoneal macrophages were obtained following intraperitoneal thioglycolate injection of 1 year old wild type and null mice. Thymocytes were harvested and apoptosis induced by 24 hour treatment with dexamethasone. LPLA2+/+ (WT) and LPLA2−/− (KO) macrophages were incubated with wild type apoptotic thymocytes for 0.5, 1, 2, and 4 hours. After incubation, the plates were washed and the residual apoptotic bodies were measured by co-staining of the macrophages with anti-CD68 and TUNEL (FIG. 7A-7H). No differences were observed in the rate of uptake or of the peak number of apoptotic bodies incorporated between the wild type and null macrophages. However, a marked difference was observed in the persistence of apoptotic bodies in the LPLA2−/− macrophages at 4 hours (FIG. 7H). When expressed as a phagocytic index, a highly significant difference was observed between the wild type and null macrophages (FIG. 8).

[0233] B and T cell stimulation assays were used to ascertain whether differences exist in the responsiveness between LPLA2−/− and LPLA2+/+ mice. B and T cells were isolated from the spleens of 8 month old female mice and stimulated with antibodies to CD40 (FIG. 9A), CD3 (FIG. 9B), and CD3 and CD28 (FIG. 9C) in order to measure B cell stimulation, T cell stimulation, or T cell co-stimulation respectively. Cell proliferation was measured by tritiated thymidine incorporation 3 days following isolation and stimulation. No difference was observed in B cell responsiveness to CD40. However, the LPLA2−/− T cells were less responsive to both direct stimulation with CD3 and co-stimulation with CD3 and CD28 (FIGS. 9B and 9C). This latter response is opposite to that reported in the G2A knockout mouse. Mixed lymphocyte reaction (MLR) assays were also performed using autologous, syngeneic, and allogeneic stimulators (FIG. 9D). The LPLA2−/− response to allogeneic stimulation was significantly less than that observed in the wild type T cells. This may be significant in that several studies have been reported demonstrating a decrease in MLR activity in lupus patients (Kuntz et al., J Clin Invest. 63(1):151-153, 1979).

### EXAMPLE 3

### LPLA2 is Secredt from Macrophages Following Activation and is Reincorporated into Macrophages Via Mannose Receptor

[0234] LPLA2 has been reported to be secreted from macrophages following activation by ligand (Abe et al., J Immunol 181: 7873-7881, 2008). For example, the binding and phagocytosis of zymosan result in the time dependent release of LPLA2 from alveolar macrophages.

[0235] The ability of macrophages from LPLA2−/− mice to recognize, endocytose, and traffic recombinant LPLA2 was studied as follows. LPLA2 null alveolar macrophages were exposed to His-tagged mouse LPLA2 for 1 day at concentrations varying between 0.3 and 10 μg/ml. Cell incorporation was measured by Western blotting and confocal microscopy using either anti-His antibody or a monoclonal antibody raised to LPLA2. A concentration dependent increase in cellular LPLA2 was easily detected and confirmed by enzyme activity measurements. When treated cells were stained with both anti-LPLA2 and Lamp-1 antibodies, co-localization of the recombinant enzyme and the lysosome protein were readily detected.

[0236] To ascertain whether the recognition and incorporation of the recombinant LPLA2 was through recognition by a mannose versus mannose-phosphate receptor, the incorporation experiments were repeated in the presence of either 10 mM a-methyl-mannoside or 10 mM mannose-6-phosphate. a-Methyl-mannoside but not mannose-6-phosphate blocked the incorporation of LPLA2 as measured by cellular 1-O-acyl-ceramide synthase activity, immunoblotting, and confocal microscopy. Finally, the ability of the recombinant enzyme to “rescue” the cellular phenotype was confirmed by measuring the cellular phospholipid content. A concentration dependent decrease in cell phosphatidylcholine and phosphatidylethanolamine was observed. Catalytically inactive enzyme did not lower the phospholipid levels.

[0237] Collectively, these data confirm that LPLA2 is secreted by macrophages in response to zymosan and once secreted can be reclaimed through a mannose receptor dependent process. These data also raise the possibility that a primary mode of action of LPLA2 may be the degradation of extracellular phospholipids to form free fatty acids and lyso-PC and lyso-PE.

### EXAMPLE 4

### Cationic Amphiphlic Drugs Inhibit LPLA2 Activity and result in Cellular Phospholipidosis

[0238] Ceramide analogue 1-phenyl-2-decanoylamino-3-morpholino-1-propanol (PDMP) has been observed to inhibit acidic transacylation of ceramide localized to the lysosomal fraction of cells. PDMP is structurally similar to drugs that are chemically characterized as cationic amphiphilic drugs. The possibility that such cationic amphiphilic drugs might cause cellular phospholipidosis through a comparable mechanism was tested as follows.

[0239] MDCK cells were treated for 1 or seven days with the cationic amphiphilic drugs PDMP, amiodarone, and tetracycline. LPLA2 activity was measured as the transacylation of N-acetylsphingosine. Amiodarone is a prototypic agent that causes phospholipidosis (and SLE); tetracycline has no known association with either lupus or phospholipidosis. Amiodarone and PDMP were both associated with a concentration dependent inhibition of LPLA2 activity as measured by ceramide transacylation (FIG. 10A). Amiodarone and PDMP but not tetracycline displayed comparable IC50s for enzyme inhibition. Tetracycline was without inhibitory effect. Amiodarone treatment also resulted in a time dependent increase in cell phospholipids, most notably PC and PE. The major cellular phospholipids were assayed following 1 or 7 days of exposure to the CAD. Highly significant changes in the LPLA2 substrates PE and PC were observed by 7 days of treatment but no changes in sphingomyelin (SM) were observed (FIG. 10B).

[0240] The inhibition of LPLA2 activity by amiodarone and other cationic amphiphiles could have resulted from the direct binding of these drugs to the enzyme through a competitive or non-competitive effect. An alternative mechanism was considered, the disruption of the electrostatic interaction between LPLA2 and the anionic lysosomal membrane. Lysosomal membranes are characterized by the presence of lyso-bis-phosphatidic acid, an anionic phospholipid found exclusively in acidic cellular organelles most notably the late endosome and lysosome.

[0241] To address this possibility, the 1-O-acylceramide synthase activity of LPLA2 was studied in liposomes in which the anionic lipid content was varied by the addition of sulfatide, a negatively charged, sulfate containing glycolipid that is not a substrate for LPLA2. Di-octanoyl-PC (DOPC) was used as the liposomal substrate. The reaction mixture contained 48 mM sodium citrate (pH 4.5), 10 μg/ml BSA, liposomes (127 μM phospholipid) and 14.5 ng/ml of recombinant mouse LPLA2 in 500 μl of total volume. Liposomes consisting of DOPC/NAS (3:1, molar ratio) or DOP/sulfatide/NAS (3:0.3:1, molar ratio) were incubated with the enzyme for 5, 10, 15, 30 and 45 min at 37° C. The reaction products were extracted and separated by an HPTLC plate using a solvent system consisting of chloroform/acetic acid (9:1, v/v). The reaction product, 1-O-oleoyl-NAS, quantified by scanning the plate, was plotted against time (FIG. 11A). Liposomes consisting of DOPC/galactosylceramide/NAS or DOPC/sulfatide/NAS with a different molar ratio were incubated with the recombinant enzyme at 37° C. (FIG. 11B). A time dependent increase in the transacylation activity was observed in the presence of sulfatide (FIGS. 11A and 11B) which increased as a function of the molar ratio of sulfatide.

### EXAMPLE 5

### Cationic Amphiphilic Drugs Interfere with the Electrostatic Interactions Between LPLA2 and Anionic Lipid Membranes

[0242] The effects of ionic strength, pH and amiodarone on LPLA2 enzymatic activity and on the electrostatic interaction between LPLA2 and liposomes were determined.

[0243] The reaction mixture contained 0-500 mM NaCl, 48 mM sodium citrate (pH 4.5), 10 μg/ml BSA, liposomes (127 μM phospholipid) and either 14.5 ng/ml of recombinant mouse LPLA2 (+) or 7.8 μg protein/ml of the soluble fraction obtained from MDCK cells transfected with mouse LPLA2 (+) in 500 μl of total volume. Before starting the reaction, liposomes consisting of DOPC, sulfatide and NAS (3:0.3:1, molar ratio) were pre-incubated for 5 min at 37° C. The reaction was initiated by adding the recombinant LPLA2 and carried out at 37° C. The reaction products were extracted and separated by an HPTLC plate using a solvent system consisting of chloroform/acetic acid (9:1, v/v). One of the products, 1-O-oleoyl-NAS, quantified by scanning the plate, was plotted against NaCl concentration (FIG. 12A). Liposomes consisting of DOPC sulfatide and NAS were pre-incubated with a different concentration of cationic amphiphilic drug, amiodarone, for 5 min at 37° C. and then incubated with the recombinant LPLA2 (FIG. 12C). The reaction was carried out in sodium citrate/sodium phosphate buffer with various pH (FIG. 12B).

[0244] As one would predict for an enzyme-liposome interaction that was dependent on electrostatic interactions, increasing either the NaCl concentration or pH of the reaction mixture significantly inhibited the transacylase activity of the enzyme (FIGS. 12A and 12B). Importantly, if the LPLA2 activity was simply measured as an esterase using the water soluble substrate p-nitro-phenylbutyrate (p-NPB) in the absence of liposomes, the pH dependence was largely lost. Increasing the concentration of amiodarone, a classic cationic amphiphilic drug, similarly inhibited the enzyme activity (FIG. 12C).

[0245] In order to determine whether the disruption of the electrostatic interaction between LPLA2 and the liposome could be measured as a physical interaction, co-sedimentation of the enzyme and liposomes was detected after high speed ultracentrifugation and separation by SDS-PAGE while the ionic strength, pH, and presence of amiodarone were varied. Liposomes consisting of DOPC or DOPC/sulfatide (10:1, molar ratio) were incubated with varying amounts of recombinant mouse LPLA2 in 500 μl of 48 mM Na-citrate (pH 4.5) for 30 min on ice (FIG. 13A). Liposomes consisting of DOPC, DOPC/sulfatide (10:1, molar ratio) or DOPC/galactosylceramide (10:1, molar ratio) were incubated with 4 μg of the recombinant LPLA2 or 16 μg of the recombinant LPLA2 with or without 500 mM NaCl or 33 μM amiodarone (FIGS. 13B and 13C). The reaction mixtures were centrifuged for 1 h at 150,000 g at 4° C. The concentration of DOPC in these assays was 127 μM. The resultant precipitates were briefly washed with cold 50 mM Na-citrate (pH 4.5) and dissolved with 40 μl of SDS-polyacrylamide gel electrophoresis sampling buffer. The samples were separated by using 12% SDS-polyacrylamide gel. After electrophoresis, LPLA2 was detected by staining with CBB.

[0246] The physical association between LPLA2 and liposomes was increased in the presence of sulfatide (FIG. 13B) and was inhibited with higher pH, NaCl concentration, or the presence of amiodarone (FIG. 13C). These data indicate that cationic amphiphilic drugs inhibit LPLA2 activity by interfering with the electrostatic interactions between LPLA2 and anionic lipid membranes.

### EXAMPLE 6

### LPLA2 Gene Expression is Decreased in the Glomeruli of Lupus Patients Compared to Patients with Other Glomerular Diseases

[0247] To determine whether the expression of LPLA2 differed between patients with lupus and patients with other forms of glomerular disease, gene expression profiles from patients were analyzed. The Division of Nephrology at the University of Michigan contains the Applied Systems Biology Core Laboratory. This group has biobanked and analyzed the gene expression profiles of renal biopsies from patients with a variety of renal disorders obtained from centers in Europe and the United States. Control biopsy specimens are obtained from healthy kidney donors at the time of transplantation. At the time of biopsy, the glomerular and tubulointerstial compartments are separated by microdissection and the mRNA profiles obtained. Analysis using statistical analysis by microarray (SAM) revealed a significantly lower expression level in lupus glomeruli compared to controls or biopsies from patients with diabetes, IgA nephropathy, minimal change disease, or hypertensive nephrosclerosis (Table 2).

| | Fold Change | |
|---|---|---|
| | SAM | q-value |
| SLE (glom) | 0.857 | 0.009 |
| n = 32 | | |
| SLE (ti) n = 32 | 1.023 | 0.198 |
| IgA (glom) n = 27 | 1.086 | 0.293 |
| IgA (ti) n = 25 | 1.236 | 0.087 |
| MCD (glom) n = 6 | 1.142 | 0.336 |
| MCD (ti) n = 5 | 1.012 | NS |
| Early DM (glom) | 1.329 | 0.001 |
| n = 22 | | |
| Early DM (ti) | 0.970 | 0.242 |
| n = 22 | | |
| Prog DM (glom) | 0.116 | 0.552 |
| n = 7 | | |
| Prog DM (ti) n = 7 | 1.040 | 0.526 |
| HTN (glom) | 1.198 | 0.058 |
| n = 15 | | |
| HTN (ti) n = 20 | 1.191 | 0.407 |

[0248] mRNA expression profiles were obtained from five different glomerular diseases including early and progressive diabetic nephropathy (DM), IgA nephropathy, minimal change disease (MCD) and hypertensive nephrosclerosis (HTN). mRNA was obtained from renal biopsies representing a 5 mm core cortical sample from patients with a range of estimated GFRs and in whom the diagnosis was established by pathological investigation by light and electron microscopy. Biopsies were micro-dissected into glomerular (g) and tubulo-interstitial (ti) compartments. The mRNA profiles were obtained using published protocols with an inter-array reproducibility above 0.98. RNA amplification ensured probe set detection independent of the number of glomeruli isolated. Data stored in the ASBC was processed in a standardized open-source analysis pipeline, Genepattern, to generate gene expression maps. LPLA2 expression was compared between different glomerular diseases and analyzed using significance analysis of microarrays (SAM) (Lorz et al., J Am Soc Nephrol. 19(5):904-14, 2008). Significance was expressed as a q value which accounts for the false discovery rate of multiple samples.

[0249] These data show that mRNA expression of LPLA2 is decreased in the microdissected glomeruli of patients with lupus, compared to the glomeruli of normal controls and glomeruli of patients with glomerular disease secondary to diabetes, hypertensive nephrosclerosis, minimal change disease, and IgA nephropathy.

### EXAMPLE 7

### Assays for LPLA2 Activity and Autoantibodies in Human Serum

[0250] LPLA2 null mice and G2A null mice are indistinguishable with the exception of the development of foam cells in the former knockout model. The inability to locally produce either lyso-phosphatidylcholine or free fatty acid in the lymph node or spleen germinal centers may represent the mechanistic link between these two models of lupus. Alternatively, LPLA2 may represent the first gene product identified as required for the digestion of apoptotic bodies.

[0251] SLE represents a complex clinical syndrome. The lupus syndrome may be comprised of a number of mechanistically distinct but phenotypically similar diseases. LPLA2 represents a newly described lysosomal protein that is the long sought acidic, secreted phospholipase A2. The loss of this activity in mice results in a very strong phenotype that mimics many of the clinical features of lupus. Furthermore, an analysis of the plasma lysosomal protein proteome reveals that LPLA2 circulates in human circulation. In order to test whether a loss of LPLA2 activity is a marker of active lupus, serum assays were first developed for LPLA2 activity and for autoantibodies to LPLA2.

[0252] A. Serum Lysosomal Phospholipase A2 Assay

[0253] LPLA2 activity is distinct from that of other known phospholipase A2s based on two primary properties. First, the enzyme displays an acidic pH optimum of 4.5 and has little detectable activity of pH 7.4. Second, the enzyme acts both as a phospholipase A2 and as a transacylase. N-acetyl-sphingoline (NAS, C2 ceramide) is a preferred lipophilic acceptor for the enzyme. Thus the formation of the fatty acyl ester of C2 ceramide, 1-O-acyl-N-acetyl-sphingosine, provides a highly specific measure of activity and is the principle behind the proposed assay to be used (Shayman, J. A., and Abe, A. Methods Enzymol 311, 105-117, 2000).

[0254] To date, LPLA2 assays have been restricted to recombinant enzyme, cultured cells, cell culture supernatants, and tissue homogenates. Several factors may affect the recovery and measurement of LPLA2 in plasma or serum and will need to be explored in the process of validating this assay.

[0255] The following assay for the enzyme is designed to determine whether LPLA2 circulates as a free protein or bound protein, whether cofactors in plasma or serum modulate LPLA2 activity, whether there are additional enzymes that metabolize the products of LPLA2 activity found in plasma or serum, and whether there endogenous lipids in plasma or serum that will compete with the assay substrate and thereby inhibit LPLA2 activity.

[0256] The phospholipids DOPC and phosphatidylethanolamine (PE) along with NAS are used in the assay system as donor and acceptor, respectively, of an acyl group. The transacylase activity is determined by analysis of the 1-O-acyl-N-acetylsphingosine formation rate. The reaction mixture consist of 45 mM sodium citrate (pH 4.5), 10 μg/ml bovine serum albumin, 40 μM NAS incorporated into phospholipid liposomes (DOPC/PE/dicetyl phosphate/NAS (5:2:1:2 in molar ratio)), and a soluble fraction (0.7-10 μg) in a total volume of 500 μl. The reaction is initiated by adding the serum or plasma sample, kept for 5-6 min. at 37° C., and terminated by adding 3 ml of chloroform/methanol (2:1) plus 0.3 ml of 0.9% (w/v) NaCl. The mixture is centrifuged for 5 min at room temperature. The resultant lower layer is transferred into another glass tube and dried down under a stream of nitrogen gas. The dried lipid, dissolved in 40 μl of chloroform/methanol (2:1) is applied on a high performance thin layer chromatography plate and developed in a solvent system consisting of chloroform/acetic acid (9:1). The plate was dried down and soaked in 8% (w/v) CuSO₄, 5H₂O, 6.8% (v/v) H₃PO₄, and 32% (v/v) methanol. The uniformly wet plate is briefly dried down by a hair dryer and charred for 15 min. in a 150° C. oven. The plate is scanned, and the chemical mass of the reaction products are estimated by the NIH Image version 1.62.

[0257] The potential effects of cofactors, protein binding, interfering lipids, or metabolism of product is evaluated by a number of experiments. These include determining the formation of product over time and as a function of sample size. In addition, serum samples can be “spiked” with known amounts of authentic, recombinant LPLA2 to ascertain if interfering substances are present. Recombinant LPLA2 can also be assayed in the presence of albumin or lipoprotein to determine whether these interfere with the assay. The enzyme activity is expressed as amoles 1-O-acyl-NAS formed per ml serum per minute. The activities in human serum and plasma are compared as well as the reproducibility of the assay in the same sample with repeated measurements over time. The effects of storage, heparin, calcium, chelation, and freeze thawing are additional factors that are evaluated.

[0258] B. Serum assay for lysosomal phospholipase A2 autoantibodies

[0259] The following protocol is employed for the measurement of autoantibodies to LPLA2. Recombinant LPLA2 (0.1 to 0.5 μg in 50 μl PBS per well) is absorbed onto microtiter plate wells by overnight incubation of 4° C. The plates are washed 4 times with PBS/0.1% Tween. The plates are then blocked for 1 hour with 50 μl of PBS with 10 mg/ml bovine serum albumin. Wells are washed with the PBS/Tween solution and then serum samples or controls are added for 2 hours at room temperature and then overnight at 4° C. The wells are washed again with PBS/Tween and then a secondary anti-human IgG antibody is added for 2 hours at room temperature. Following the same washing step, detection utilizes O-phenylenediamine dihydrochloride as substrate for horseradish peroxidase. Plate well absorbance is read at 492 nm.

[0260] Important variables to establish include whether the serum samples require dilution, whether the LPLA2 used for coating the plates should be denatured with carbonate buffer (pH 9.6, 0.05 M), and whether the serum samples should be similarly denatured with carbonate buffer.

[0261] The reproducibility of detecting antibodies present, the effects of serum freezing and storage, and the potential effects of interfering substances on the assay are variables that will be considered in the validation of this assay.

### EXAMPLE 8

### LPLA2 Activity and Autoantibody Titers in Bio-Banked Serum Samples and Correlation of the Clinical Profiles to the SLE Disease Activity Index

[0262] The Michigan Lupus Cohort (MLC) is a dynamic, prospective cohort of SLE patients receiving ongoing care at the University of Michigan. The MLC was established in the year 2000 and currently includes over 600 patients (90% female; 79% white, 17% black, 1% Hispanic, 2% Asian/Pacific Islander, 1% other). Cohort participants sign informed consent which enables systematic follow up of clinical, social and demographic data. Detailed laboratory and clinical data, including prospective assessment of disease activity (SLEDAI score) (Bombardier, C. et a. Arthritis Rheum 35, 630-640, 1992), are collected at each clinic visit, which typically occurs at three month intervals. A repository of blood samples (which are collected in association with most clinic visits) has also been prospectively generated since start of the MLC. The MLC also serves as a screening and recruiting tool for SLE protocols, and has facilitated numerous collaborations and ancillary projects.

[0263] The MLC is the source of patient sera and clinical data for measurement of LPLA2 activity and auto antibody titers. The longitudinal nature and richness of the clinical data make this an exceptionally valuable resource for this study. Sera is assayed from every patient currently participating in the MLC. These assays are performed in a blinded fashion ion and samples are randomly assayed without regard for disease activity or clinical phenotype. Age and gender matched samples from healthy patients as well as those with the absence of autoimmune disease (e.g. osteoarthritis) are studied as controls. Based on these measurements, a normal range for LPLA2 activity is determined. For patients identified that either exhibit significantly lower activities of LPLA2 compared to controls or the presence of significant titers of anti-LPLA2 antibodies, a comprehensive evaluation of their clinical phenotypes is undertaken. A significant number of MLC patients exhibiting low LPLA2 activity or elevated anti-LPLA2 demonstrate a statistically significant association between these findings and the presence of a particular clinical phenotype (e.g. lymphadenopathy) or laboratory finding (e.g., anti-phospholipid antibodies). For those patients that are found to have positive findings, a retrospective determination of LPLA2 activity and antibody titer is made on all samples available to investigate a correlation with disease activity. The potential association between gender and LPLA2 activity and auto-antibody titers is also evaluated.

### EXAMPLE 9

### LPLA2 Activity in an Animal Model

[0264] Human or mammalian LPLA2 enzyme, or a variant or derivative thereof is tested in an animal model exhibiting an accumulation of tingible body macrophages are known, e.g., LPLA2−/− knockout mouse model. Other mouse models in which such agents are tested for ability to reduce accumulation of intracellular tingible body macrophages or reduce other signs and symptoms of autoimmune disease include: the Ro mouse model (Xue et a., Proc Natl Acad Sci U S A 100: 7503-7508, 2003), the Tyro 3 mouse model (Lu et a., Science 293: 306-311, 2001), the c-mer mouse model (Cohen et al., J Exp Med 196: 135-140, 2002), and the MFG-E8 mouse model (Hanayama et al., Science 304: 1147-1150, 2004).

[0265] The references cited herein throughout, to the extent that they provide exemplary procedural or other details supplementary to those set forth herein, are all specifically incorporated herein by reference.

We claim:

1. A method of reducing accumulation of intracellular tingible body macrophages comprising the step of contacting a cell having an accumulation of tingible body macrophages with an agent having lysosomal phospholipase A2 (LPLA2) enzymatic activity in an amount effective to reduce the accumulation of tingible body macrophages.

2. The method of claim 1 wherein the agent having LPLA2 enzymatic activity is a protein comprising an amino acid sequence selected from the group consisting of SEQ ID NOs: 1-288.

3. The method of claim 1 wherein said agent is a mammalian LPLA2 enzyme.

4. The method of claim 1 wherein said agent is a human LPLA2 enzyme.

5. The method of claim 1 wherein said agent is an LPLA2 enzyme comprising one or more mannose residues.

6. The method of claim 4 wherein said human LPLA2 enzyme comprises the amino acid sequence set out in SEQ ID NO: 1, or a fragment thereof, derivative or variant of SEQ ID NO: 1 having LPLA2 enzymatic activity.

7. The method of claim 6 wherein said human LPLA2 enzyme comprises the catalytic site corresponding to amino acids 196-200 (A-X-S-X-G) of SEQ ID NO: 1.

8. The method of claim 7 wherein said human LPLA2 enzyme further comprises a cysteine bond corresponding to the cysteine bond between the Cys at position 65 and the Cys 89 of SEQ ID NO: 1.

9. The method of claim 7 wherein said human LPLA2 enzyme comprises an amino acid sequence having at least 80% identity to the amino acid sequence of a fragment of SEQ ID NO: 1 that is at least 75 residues in length and that comprises amino acids 196-200 of SEQ ID NO: 1.

10. The method of claim 3 wherein said mammalian LPLA2 enzyme is a protein comprising an amino acid sequence selected from the group consisting of SEQ ID NOs: 1-288 and a fragment, derivative and variant of SEQ ID NOs: 1-288.

11. The method of claim 10 wherein said LPLA2 enzyme comprises the catalytic consensus sequence -A-X-S-X-G-.

12. A method of treating a patient diagnosed with a disorder characterized by the intracellular accumulation of tingible body macrophages comprising administering to said patient an effective amount of an agent having LPLA2 enzymatic activity.

13. The method of claim 12 wherein the disorder is systemic lupus erythematosus.

14. The method of claim 12 wherein the disorder is drug-induced lupus.

15. The method of any of claims 12-14 wherein the agent having LPLA2 enzymatic activity is a protein comprising an amino acid sequence selected from the group consisting of SEQ ID NOs: 1-288.

16. The method of any of claims 12-14 wherein said agent is a mammalian LPLA2 enzyme.

17. The method of any of claims 12-14 wherein said agent is a human LPLA2 enzyme.

18. The method of claim any of claims 12-14 wherein said agent is an LPLA2 enzyme comprising one or more mannose residues.

19. The method of claim 18 wherein said human LPLA2 enzyme comprises the amino acid sequence set out in SEQ ID NO: 1, or a fragment thereof, derivative or variant of SEQ ID NO: 1 having LPLA2 enzymatic activity.

20. The method of claim 19 wherein said human LPLA2 enzyme comprises the catalytic site corresponding to amino acids 196-200 (A-X-S-X-G) of SEQ ID NO: 1.

21. The method of claim 20 wherein said human LPLA2 enzyme further comprises a cysteine bond corresponding to the cysteine bond between the Cys at position 65 and the Cys 89 of SEQ ID NO: 1.

22. The method of claim 20 wherein said human LPLA2 enzyme comprises an amino acid sequence having at least 80% identity to the amino acid sequence of a fragment of SEQ ID NO: 1 that is at least 75 residues in length and that comprises amino acids 196-200 of SEQ ID NO: 1.

23. The method of claim 16 wherein said mammalian LPLA2 enzyme is a protein comprising an amino acid sequence selected from the group consisting of SEQ ID NOs: 1-288 and a fragment, derivative and variant of SEQ ID NOs: 1-288.

24. The method of claim 23 wherein said LPLA2 enzyme comprises the catalytic consensus sequence -A-X-S-X-G-.

25. A method of screening for a potential therapeutic that decreases intracellular levels of tingible body macrophages comprising the step of measuring the number or phagocytic index of intracellular tingible body macrophages in a lupus mouse model in the presence and absence of a test compound, wherein a decreased intracellular tingible body macrophage level in the presence of the test compound compared to an intracellular tangible body macrophage level in the absence of the test compound identifies the test compound as a potential therapeutic, and wherein the test compound is a fragment, variant or derivative of SEQ ID NO: 1-288.

26. A method of screening for a potential therapeutic that decreases intracellular levels of tingible body macrophages comprising the step of measuring LPLA2 enzyme activity in the presence and absence of a test compound, wherein an increased level of LPLA2 enzyme activity in the presence of the test compound compared to the absence of the test compound identifies the test compound as a potential therapeutic.

27. A method for diagnosing systemic lupus erythematosus in an individual comprising the step of determining lysosomal phospholipase A2 (LPLA2) enzymatic activity in a sample from an individual, or the step of determining LPLA2 expression in a sample from an individual, wherein an LPLA2 enzymatic activity or LPLA2 expression level that is decreased in the individual compared to LPLA2 enzymatic activity or LPLA2 expression level in a normal individual is suggestive of a diagnosis of systemic lupus erythematosus, wherein said normal individual is known not to suffer from systemic lupus erythematosus.

28. The method of claim 27 wherein an LPLA2 enzymatic activity or LPLA2 expression level that is decreased in the individual compared to prior LPLA2 enzymatic activity or LPLA2 expression level in the same individual is suggestive of the diagnosis of systemic lupus erythematosus.

29. A method for determining susceptibility to systemic lupus erythematosus in an individual comprising the step of determining lysosomal phospholipase A2 (LPLA2) enzymatic activity in a sample from an individual, or the step of determining LPLA2 expression in a sample from an individual, wherein a decreased LPLA2 enzymatic activity or LPLA2 expression level in the individual compared to LPLA2 enzymatic activity or LPLA2 expression level in a normal individual indicates susceptibility to systemic lupus erythematosus.

30. The method of claim 29 wherein a decreased LPLA2 enzymatic activity or LPLA2 expression level compared to prior LPLA2 enzymatic activity or LPLA2 expression level in the same individual indicates susceptibility to systemic lupus erythematosus.

31. A method for diagnosing systemic lupus erythematosus comprising the step of detecting lysosomal phospholipase A2 (LPLA2) autoantibodies in a sample from an individual, wherein detecting increased levels of LPLA2 autoantibodies in the individual compared to the level of LPLA2 autoantibodies in a normal individual is suggestive of systemic lupus erythematosus diagnosis, wherein said normal individual is known not to suffer from systemic lupus erythematosus.

32. The method of claim 31 wherein detecting an increased level of LPLA2 autoantibodies in a sample from an individual compared to a prior level of LPLA2 autoantibodies in the same individual is suggestive of a diagnosis of systemic lupus erythematosus.

33. A method for determining susceptibility to systemic lupus erythematosus in an individual comprising the step of detecting lysosomal phospholipase A2 (LPLA2) autoantibodies in a sample from an individual, wherein a detecting increased levels of LPLA2 autoantibodies in the individual compared to the level of LPLA2 autoantibodies in a normal individual is suggestive of systemic lupus erythematosus susceptibility, wherein said normal individual is known not to suffer from systemic lupus erythematosus.

34. The method of claim 33 wherein detecting an increased level of LPLA2 autoantibodies in a sample from an individual compared to a prior level of LPLA2 autoantibodies in the same individual is suggestive of susceptibility to systemic lupus erythematosus.

35. A method for determining the progression of systemic lupus erythematosus in an individual comprising the step of determining lysosomal phospholipase A2 (LPLA2) enzymatic activity in samples from the individual taken over time wherein a decrease in LPLA2 enzymatic activity in the samples taken over time in the individual is suggestive of progression of systemic lupus erythematosus.

36. A method for determining the progression of systemic lupus erythematosus in an individual comprising the step of detecting lysosomal phospholipase A2 (LPLA2) autoantibodies in samples from the individual taken over time wherein an increase in LPLA2 autoantibodies in the samples taken over time in the individual is suggestive of progression of systemic lupus erythematosus.

37. The method of claim 1 or claim 12 further comprising treating patients having a polymorphism that reduces expression or activity of LPLA2.

38. The method of claim 37 wherein the polymorphism is at a position corresponding to amino acids 196-200 of SEQ ID NO: 1.

The application's sequence listing, which the Patent Office published only in electronic form, follows.

SEQUENCE LISTING (290 sequences)

SEQ ID NO: 1 - protein, 412 aa, Homo sapiens
MGLHLRPYRVGLLPDGLLFLLLLLMLLADPALPAGRHPPVVLVPGDLGNQLEAKLDKPTVVHYLCSKKTESYFTIWLNLELLLPVIIDCWIDNIRLVYNKTSRATQFPDGVDVRVPGFGKTFSLEFLDPSKSSVGSYFHTMVESLVGWGYTRGEDVRGAPYDWRRAPNENGPYFLALREMIEEMYQLYGGPVVLVAHSMGNMYTLYFLQRQPQAWKDKYIRAFVSLGAPWGGVAKTLRVLASGDNNRIPVIGPLKIREQQRSAVSTSWLLPYNYTWSPEKVFVQTPTINYTLRDYRKFFQDIGFEDGWLMRQDTEGLVEATMPPGVQLHCLYGTGVPTPDSFYYESFPDRDPKICFGDGDGTVNLKSALQCQAWQSRQEHQVLLQELPGSEHIEMLANATTLAYLKRVLLGP

SEQ ID NO: 2 - protein, 123 aa, Ovis aries
ALWQFNGMIKCKIPSSEPLLDFNNYGCYCGLGGSGTPVDDLDRCCQTHDNCYKQAKKLDSCKVLVDNPYTNSYSYSCSNKQITCSSENNACEAFICNCDRNAAICFSEVPYNNEHKNLDKKYC

SEQ ID NO: 3 - protein, 146 aa, Rattus norvegicus
MKVLLLLAVVIMAFGSIQVQGSLLEFGQMILFKTGKRADVSYGFYGCHCGVGGRGSPKDATDWCCVTHDCCYNRLEKRGCGTKFVTYKFSYRGGQISCSTNQDSCRKQLCQCDKAAAECFARNKKSYSLKYQFYPNKFCKGKTPSC

SEQ ID NO: 4 - protein, 749 aa, Homo sapiens
MSFIDPYQHIIVEHQYSHKFTVVVLRATKVTKGAFGDMLDTPDPYVELFISTTPDSRKRTRHFNNDINPVWNETFEFILDPNQENVLEITLMDANYVMDETLGTATFTVSSMKVGEKKEVPFIFNQVTEMVLEMSLEVCSCPDLRFSMALCDQEKTFRQQRKEHIRESMKKLLGPKNSEGLHSARDVPVVAILGSGGGFRAMVGFSGVMKALYESGILDCATYVAGLSGSTWYMSTLYSHPDFPEKGPEEINEELMKNVSHNPLLLLTPQKVKRYVESLWKKKSSGQPVTFTDIFGMLIGETLIHNRMNTTLSSLKEKVNTAQCPLPLFTCLHVKPDVSELMFADWVEFSPYEIGMAKYGTFMAPDLFGSKFFMGTVVKKYEENPLHFLMGVWGSAFSILFNRVLGVSGSQSRGSTMEEELENITTKHIVSNDSSDSDDESHEPKGTENEDAGSDYQSDNQASWIHRMIMALVSDSALFNTREGRAGKVHNFMLGLNLNTSYPLSPLSDFATQDSFDDDELDAAVADPDEFERIYEPLDVKSKKIHVVDSGLTFNLPYPLILRPQRGVDLIISFDFSARPSDSSPPFKELLLAEKWAKMNKLPFPKIDPYVFDREGLKECYVFKPKNPDMEKDCPTIIHFVLANINFRKYKAPGVPRETEEEKEIADFDIFDDPESPFSTFNFQYPNQAFKRLHDLMHFNTLNNIDVIKEAMVESIEYRRQNPSRCSVSLSNVEARRFFNKEFLSKPKA

SEQ ID NO: 5 - protein, 1487 aa, Mus musculus
MVQWLAMLQLLWLQQLLLLGIHQGIAQDLTHIQEPSLEWRDKGIFIIQSESLKTCIQAGKSVLTLENCKQPNEHMLWKWVSDDHLFNVGGSGCLGLNISALEQPLKLYECDSTLISLRWHCDRKMIEGPLQYKVQVKSDNTVVARKQIHRWIAYTSSGGDICEHPSRDLYTLKGNAHGMPCVFPFQFKGHWHHDCIREGQKEHLLWCATTSRYEEDEKWGFCPDPTSMKVFCDATWQRNGSSRICYQFNLLSSLSWNQAHSSCLMQGGALLSIADEDEEDFIRKHLSKVVKEVWIGLNQLDEKAGWQWSDGTPLSYLNWSQEITPGPFVEHHCGTLEVVSAAWRSRDCESTLPYICKRDLNHTAQGILEKDSWKYHATHCDPDWTPFNRKCYKLKKDRKSWLGALHSCQSNDSVLMDVASLAEVEFLVSLLRDENASETWIGLSSNKIPVSFEWSSGSSVIFTNWYPLEPRILPNRRQLCVSAEESDGRWKVKDCKERLFYICKKAGQVPADEQSGCPAGWERHGRFCYKIDTVLRSFEEASSGYYCSPALLTITSRFEQAFITSLISSVAEKDSYFWIALQDQNNTGEYTWKTVGQREPVQYTYWNTRQPSNRGGCVVVRGGSSLGRWEVKDCSDFKAMSLCKTPVKIWEKTELEERWPFHPCYMDWESATGLASCFKVFHSEKVLMKRSWREAEAFCEEFGAHLASFAHIEEENFVNELLHSKFNWTQERQFWIGFNRRNPLNAGSWAWSDGSPVVSSFLDNAYFEEDAKNCAVYKANKTLLPSNCASKHEWICRIPRDVRPKFPDWYQYDAPWLFYQNAEYLFHTHPAEWATFEFVCGWLRSDFLTIYSAQEQEFIHSKIKGLTKYGVKWWIGLEEGGARDQIQWSNGSPVIFQNWDKGREERVDSQRKRCVFISSITGLWGTENCSVPLPSICKRVKIWVIEKEKPPTQPGTCPKGWLYFNYKCFLVTIPKDPRELKTWTGAQEFCVAKGGTLVSIKSELEQAFITMNLFGQTTNVWIGLQSTNHEKWVNGKPLVYSNWSPSDIINIPSYNTTEFQKHIPLCALMSSNPNFHFTGKWYFDDCGKEGYGFVCEKMQDTLEHHVNVSDTSAIPSTLEYGNRTYKIIRGNMTWYAAGKSCRMHRAELASIPDAFHQAFLTVLLSRLGHTHWIGLSTTDNGQTFDWSDGTKSPFTYWKDEESAFLGDCAFADTNGRWHSTACESFLQGAICHVVTETKAFEHPGLCSETSVPWIKFKGNCYSFSTVLDSRSFEDAHEFCKSEGSNLLAIRDAAENSFLLEELLAFGSSVQMVWLNAQFDNNNKTLRWFDGTPTEQSNWGLRKPDMDHLKPHPCVVLRIPEGIWHFTPCEDKKGFICKMEAGIPAVTAQPEKGLSHSIVPVTVTLTLIIALGIFMLCFWIYKQKSDIFQRLTGSRGSYYPTLNFSTAHLEENILISDLEKNTNDEEVRDAPATESKRGHKGRPICISP

SEQ ID NO: 6 - protein, 144 aa, Homo sapiens
MKTLLLLAVIMIFGLLQAHGNLVNFHRMIKLTTGKEAALSYGFYGCHCGVGGRGSPKDATDRCCVTHDCCYKRLEKRGCGTKFLSYKFSNSGSRITCAKQDSCRSQLCECDKAAATCFARNKTTYNKKYQYYSNKHCRGSTPRC

SEQ ID NO: 7 - protein, 752 aa, Rattus norvegicus
MSFIDPYQHIIVEHQYSHKFTVVVLRATKVTKGTFGDMLDTPDPYVELFISTTPDSRKRTRHFNNDINPVWNETFEFILDPNQENVLEITLMDANYVMDETLGTATFPVSSMKVGEKKEVPFIFNQVTEMILEMSLEVCSCPDLRFSMALCDQEKTFRRQRKENIKENMKKLLGPKKSEGLYSTRDVPVVAILGSGGGFRAMVGFSGVMKALYESGILDCATYVAGLSGSTWYMSTLYSHPDFPEKGPEEINEELMKNVSHNPLLLLTPQKVKRYVESLWKKKSSGQPVTFTDIFGMLIGETLIQNRMSTTLSSLKEKVSAARCPLPLFTCLHVKPDVSELMFADWVEFSPYEIGMAKYGTFMTPDLFGSKFFMGTVVKKYEENPLHFLMGVWGSAFSILFNRVLGVSGSQNKGSTMEEELENITAKHIVSNDSSDSDDEAQGPKGTENEDAEREYQNDNQASWVHRMLMALVSDSALFNTREGRAGKEHNFMLGLNLNTSYPLSPLRDFSPQDSFDDDELDAAVADPDEFERIYEPLDVKSKKIHVVDSGLTFNLPYPLILRPQRGVDLIISFDFSARPSDTSPPFKELLLAEKWAKMNKLPFPKIDPYVFDREGLKECYVFKPKNPDVEKDCPTIIHFVLANINFRKYKAPGVLRETKEEKEIADFDIFDDPESPFSTFNFQYPNQAFKRLHDLMYFNTLNNIDVIKDAIVESIEYRRQNPSRCSVSLSNVEARKFFNKEFLSKPTAESI

SEQ ID NO: 8 - protein, 1463 aa, Homo sapiens
MLLSPSLLLLLLLGAPRGCAEGVAAALTPERLLEWQDKGIFVIQSESLKKCIQAGKSVLTLENCKQANKHMLWKWVSNHGLFNIGGSGCLGLNFSAPEQPLSLYECDSTLVSLRWRCNRKMITGPLQYSVQVAHDNTVVASRKYIHKWISYGSGGGDICEYLHKDLHTIKGNTHGMPCMFPFQYNHQWHHECTREGREDDLLWCATTSRYERDEKWGFCPDPTSAEVGCDTIWEKDLNSHICYQFNLLSSLSWSEAHSSCQMQGGTLLSITDETEENFIREHMSSKTVEVWMGLNQLDEHAGWQWSDGTPLNYLNWSPEVNFEPFVEDHCGTFSSFMPSAWRSRDCESTLPYICKKYLNHIDHEIVEKDAWKYYATHCEPGWNPYNRNCYKLQKEEKTWHEALRSCQADNSALIDITSLAEVEFLVTLLGDENASETWIGLSSNKIPVSFEWSNDSSVIFTNWHTLEPHIFPNRSQLCVSAEQSEGHWKVKNCEERLFYICKKAGHVLSDAESGCQEGWERHGGFCYKIDTVLRSFDQASSGYYCPPALVTITNRFEQAFITSLISSVVKMKDSYFWIALQDQNDTGEYTWKPVGQKPEPVQYTHWNTHQPRYSGGCVAMRGRHPLGRWEVKHCRHFKAMSLCKQPVENQEKAEYEERWPFHPCYLDWESEPGLASCFKVFHSEKVLMKRTWREAEAFCEEFGAHLASFAHIEEENFVNELLHSKFNWTEERQFWIGFNKRNPLNAGSWEWSDRTPVVSSFLDNTYFGEDARNCAVYKANKTLLPLHCGSKREWICKIPRDVKPKIPFWYQYDVPWLFYQDAEYLFHTFASEWLNFEFVCSWLHSDLLTIHSAHEQEFIHSKIKALSKYGASWWIGLQEERANDEFRWRDGTPVIYQNWDTGRERTVNNQSQRCGFISSITGLWGSEECSVSMPSICKRKKVWLIEKKKDTPKQHGTCPKGWLYFNYKCLLLNIPKDPSSWKNWTHAQHFCAEEGGTLVAIESEVEQAFITMNLFGQTTSVWIGLQNDDYETWLNGKPVVYSNWSPFDIINIPSHNTTEVQKHIPLCALLSSNPNFHFTGKWYFEDCGKEGYGFVCEKMQDTSGHGVNTSDMYPMPNTLEYGNRTYKIINANMTWYAAIKTCLMHKAQLVSITDQYHQSFLTVVLNRLGYAHWIGLFTTDNGLNFDWSDGTKSSFTFWKDEESSLLGDCVFADSNGRWHSTACESFLQGAICHVPPETRQSEHPELCSETSIPWIKFKSNCYSFSTVLDSMSFEAAHEFCKKEGSNLLTIKDEAENAFLLEELFAFGSSVQMVWLNAQFDGNNETIKWFDGTPTDQSNWGIRKPDTDYFKPHHCVALRIPEGLWQLSPCQEKKGFICKMEADIHTAEALPEKGPSHSIIPLAVVLTLIVIVAICTLSFCIYKHNGGFFRRLAGFRNPYYPATNFSTVYLEENILISDLEKSDQ

SEQ ID NO: 9 - protein, 132 aa, Equus caballus
ENGISPRAVWQFRSMIQCTIPNSKPYLEFNDYGCYCGLGGSGTPVDELDACCQVHDNCYTQAKELSSCRFLVDNPYTESYKFSCSGTEVTCSDKNNACEAFICNCDRNAAICFSKAPYNPENKNLDSKRKCA

SEQ ID NO: 10 - protein, 748 aa, Mus musculus
MSFIDPYQHIIVEHQYSHKFTVVVLRATKVTKGTFGDMLDTPDPYVELFISTTPDSRKRTRHFNNDINPVWNETFEFILDPNQENVLEITLMDANYVMDETLGTATFPVSSMKVGEKKEVPFIFNQVTEMILEMSLEVCSCPDLRFSMALCDQEKTFRQQRKENIKENMKKLLGPKKSEGLYSTRDVPVVAILGSGGGFRAMVGFSGVMKALYESGILDCATYIAGLSGSTWYMSTLYSHPDFPEKGPEEINEELMKNVSHNPLLLLTPQKVKRYVESLWKKKSSGQPVTFTDIFGMLIGETLIQNRMSMTLSSLKEKVNAARCPLPLFTCLHVKPDVSELMFADWVEFSPYEIGMAKYGTFMAPDLFGSKFFMGTVVKKYEENPLHFLMGVWGSAFSILFNRVLGVSGSQNKGSTMEEELENITAKHIVSNDSSDSDDEAQGPKGTENEEAEKEYQSDNQASWVHRMLMALVSDSALFNTREGRAGKVHNFMLGLNLNTSYPLSPLRDFSSQDSFDDELDAAVADPDEFERIYEPLDVKSKKIHVVDSGLTFNLPYPLILRPQRGVDLIISFDFSARPSDTSPPFKELLLAEKWAKMNKLPFPKIDPYVFDREGLKECYVFKPKNPDVEKDCPTIIHFVLANINFRKYKAPGVLRETKEEKEIADFDIFDDPESPFSTFNFQYPNQAFKRLHDLMYFNTLNNIDVIKDAIVESIEYRRQNPSRCSVSLSNVEARKFFNKEFLSKPTV

SEQ ID NO: 11 - protein, 1463 aa, Bos taurus
MPLLSLSLLLLLLQVPAGSAETAAWAVTPERLREWQDKGIFIIQSENLEKCIQASKSTLTLENCKPPNKYMLWKWVSNHRLFNIGGSGCLGLNVSSPEQPLSIYECDSTHVSLKWHCNKKTITGPLQYLVQVKQDNTLVASRKYLHKWVSYMSGGGGICDYLHKDLYTIKGNAHGTPCMFPFQYNQQWHHECTREGREDNLLWCATTSRYERDEKWGFCPDPTSTEVGCDAVWEKDLHSRICYQFNLLSSLSWSEAHSSCQMQGAALLSIADETEENFVRKHLGSEAVEVWMGLNQLDEDAGWQWSDRTPLNYLNWKPEINFEPFVEYHCGTFNAFMPKAWKSRDCESTLPYVCKKYLNPTDHGVVEKDAWKYYATHCEPGWNPHNRNCYKLQKEKKTWNEALQSCQSNNSVLTDITSLAEVEFLVTLLGDENASETWIGLSSHKIPVSFEWSNGSSVTFTNWHTLEPHIFPNRSQLCVSAEQSEGHWKVKNCEETLFYLCKKTGLVLSDTESGCQKGWERHGKFCYKIDTVLRSFDHASSGYYCPPALITITSRFEQAFITSLISSVVKTKDTYFWIALQDQNNTGEYTWKTAGQQLEPVKYTHWNTRQPRYSGGCVVMRGRSHPGRWEVRDCRHFKAMSLCKQPVENREKTKQEEGWPFHPCYLDWESEPGLASCFKVFHSEKVLMKRTWRQAEEFCEEFGAHLASFAHIEEENFVNELLHSKFNRTEERQFWIGFNKRNPLNAGSWEWSDGTPVVSSFLDNSYFGEDARNCAVYKANKTLLPSYCGSKREWICKIPRDVRPKVPPWYQYDAPWLFYQDAEYLFHISASEWSSFEFVCGWLRSDILTIHSAHEQEFIHSKIRALSKYGVNWWIGLREERASDEFRWRDGSPVIYQNWDKGKERSMGLNESQRCGFISSITGLWASEECSISMPSICKRKKVWVIEKKKDIPKQHGTCPKGWLYFDYKCLLLKIPEGPSDWKNWTSAQDFCVEEGGTLVAIENEVEQAFITMNLFGHTTNVWIGLQDDDYEKWLNGRPVSYSNWSPFDTKNIPNHNTTEVQKRIPLCGLLSNNPNFHFTGKWYFEDCREGYGFVCEKMQDASGHSINTSDMYPIPNTLEYGNRTYKIINANMTWYTALKTCLMHGAELASITDQYHQSFLTVILNRVGYAHWIGLFTEDNGLSFDWSDGTKSSFTFWKDDESSFLGDCVFADTSGRWSSTACESYLQGAICQVPTETRLSGRLELCSETSIPWIKFKSNCYSFSTVLESTSFEAAHEFCKKKGSNLLTIKDEAENSFLLEELLAFRSSVQMIWLNAQFDGDNETIKWFDGTPTDQSNWGIRKPEVYHFKPHLCVALRIPEGVWQLSSCQDKKGFICKMEADIHTVKKHPGKGPSHSVIPLTVALTLLVILAISTLSFCMYKHSHIIFGRLAQFRNPYYPSANFSTVHLEENILISDLEKNDQ

SEQ ID NO: 12 - protein, 749 aa, Equus caballus
MSFIDPYQHIIVEHQYSHKFTVVVLRATKVTKGAFGDMLDTPDPYVELFISSTPDSRKRTRHFNNNINPVWNETFEFILDPNQENVLEITLMDANYVMDETLGTATFTLSSMKVGEKKEVPFIFNQVTEMILEMSLEVCSCPDLRFSMALCDQEKTFRQQRKENIKENMKKLLGPKKSEGLYSTRDVPVVAILGSGGGFRAMVGFSGVMKALYESGILDCATYLAGLSGSSWYMSTLYSHPDFPEKGPEEINKELMKNVSYDPLLLLTPQKIKRYVESLWKKKSSGQPVTFTDIFGMLIGETLIHNRMNTTLSSLKEKVNTAQCPLPLFTCLHVKPDVSELMFADWVEFSPYEIGMAKYGTFMAPDLFGSKFFMGTVVKKYEENPLHFLMGVWGSAFSILFNRVLGVSGSQNKGSTMEEELENITAKHIVSNDSSDSDDESQEPKGTENEDAERDYQNDNQASWVHRMLMALVSDSALFNTREGRAGKVHNFMLGLNLNTSYPLSPLRNFTTQESLDDDELDAAVADPDEFERIYEPLDVKSKKIHVVDSGLTFNLPYPLILRPQRGVDLIISFDFSARPSDSSPPFKELLLAEKWAKMNKLPFPKIDPYVFDREGLKECYVFKPKNPDVEKDCPTIIHFVLANINFRKYKAPGVPRETKEEKEIADFDIFDDPESPFSTFNFQYPNQAFKRLHDLMHFNTLNNIDVIKNAMVESIEYRRQNPSRCSVSLSNVEARRFFNKEFLNKPTA

SEQ ID NO: 13 - protein, 1458 aa, Oryctolagus cuniculus
MLLSLLLLLLLGAPRRCTEGAAAALSPERVLKWQEKGIFIIQSESLKSCIQAGKSVLTLESCKQPNKNMLWKWVSNQHLFNIGGSGCLGLNLSNPEQPLGLYECDSTHVSLRWRCNRKMITGPLQHTVQVKQDNIIVASGKRLHKWISYMSDSGDICQHVHKDLYTRKGNAHGTPCMFPFQYNHQWHHECTREGRQDDSLWCATTSRYERDEKWGFCPDPTSAEVGCDAVWEKDLNSHICYQFNLLSSLSWSEAHSSCQMHGGALLSIVDEAEENFIRKQVSGEAVEVWTGLNQLDVNAGWQWSDGTPLSYLNWSPEISFEPFVEYHCGTFNSFMPRAWRSRNCESTLPYICKKYLNHVDDEIVEKDAWKYYATDCEPGWAPYHRNCYKLQKEEKTWNEALHSCLSSNSTLIDIGSLAEVEFLVTLLGNENASETWIGLSSNTFPVSFEWSNGSSVIFTNWHTLEPQIFPNRSQLCVSAEQSEGHWKVTDCEETHFYVCKKPGHVLSDAESGCQEGWERHGGFCYKIDTVLRSFDHASSGYYCPPALVTIADRFEQAFITSLISSVVNMKDSYFWIALQDQNDTGEYTWKTAGQKSEPVQYTHWNAHQPRSSGGCVAIRGRNPIGRWEVKDCVHFKAMSLCKQPVETREKMEHEERWPFHPCYLDWESQPGLASCFKVFHSEKVLMKRTWREAEAFCEEFGAHLASFAHIEEENFVNELLHPKFNRSEERQFWIGFNKRNPLNAGSWEWSDGTPVISSFLDNNYFGEDTRNCAVYKANKTLLPLHCGSKREWICKIPRDVRPKIPSWYQYDAPWLFHQDAEYLFYPHSSEWSSFEFVCGWLRSDILTIHSAHEQEFILSKIKALSKYGANWWIGLQEETANDELRWRDGTPVIYQNWDKERDRSMNNQSQRCAFISSITGLWDREECSVSMPSICKRKTFWVIEKEKDTPKQHGTCPKGWLYFDYKCLLVNVPKDPSNWKNWTQARDFCFDEGGTLVAIESEVEQAFITMNLFGQTTNVWIGLQNDDYEKWLNGNPVAYSNWSPSDIINIPSYNTTADQKPIPLCALLSSNPNFHFTGKWYFEDCGKEGYGFVCEKIQDSAGHEVNTSIMDPIPNTLEYGNRTYKIINANMTWYAAIKSCQLHGAELVSITDQYHQSFLTVILSRLGHAHWIGLFTADNGLHFDWSDGTKSSFTFWKDEDSSFLGDCVFADTSGRWHSTACESFLQGAICHVPTETRPFEHPELCSETSIPWIKFKSNCYSFSTVLHSASFEAAHEFCKKEGSNLLTIKDEAENSFLLEEPFAFGASVQMVWLNAQFDNETVKWLDGTPADQSNWGIRKPDMAHFEPHQCLALRIPEGVWQLSPCQKNMGFICKMKADIHTVKEHPGKGPSHSIVPLAVALTLVVILAIITLSFYIYKQNKGFFRRLAGVGNSYYPTTNFSTIHLEENILISDLEKND

SEQ ID NO: 14 - protein, 1464 aa, Pongo abelii
MLLSPSLLLPLLLLLGAPRGCAEGVAAALTPERLLEWQDKGIFVIQSESLKKCIQAGKSVLTLENCKQANKHMLWKWVSNHGLFNIGGSGCLGLNFSAPEQPLSLYECDSTLVSLRWRCDRKMITGPLQYSVQVAHDNTVVASRKYFHKWISYGSGGGDICEYLHKDLHTIKGNAHGMPCMFPFQYNHQWHHECTREGREDDLLWCATTSRYERDEKWGFCPDPTSAEVGCDTIWEKDLNSHICYQFNLLSSLSWSEAHSSCQMQGGALLSITDETEENFIREHMSSKTVEVWMGLNQLDEHAGWQWSDGTPLNYLNWSPEVNFEPFVEDHCGTFSSFIPSAWRSRDCASTLPYVCKKYLNHIDHEIVEKDAWKYYATHCEPGWNPYNRNCYKLQKEEKTWHEALRSCQADNSALIDITSLAEVEFLVTLLGDENASETWIGLSSNKIPVSFEWSNDSSVIFTNWHTLEPQIFPNRSQLCVSAEQSEGHWKVKNCEETLFYVCKKAGHVLSDAESGCQEGWERHGGFCYKIDTVLRSFDQASSGYYCPPALVTITNRFEQAFITSLIGSVVKMKDSYFWIALQDQNDTGEYTWKPAGQKPEPVQYTHWNAHQPRYSGGCVAMRGRHPPGRWEVKHCRHFKAMSLCKQPVENQEKAEYEERWPFHPCYLDWESEPGLASCFKVFHSEKVLMKRTWREAEAFCEEFGAHLASFAHIEEENFVNELLYSKFNWTEERQFWIGFNKRNPLNAGSWEWSDRIPVVSSFLDNNYFGEDARNCAVYKANKTLLPLHCGSKREWICKIPRDVKPKIPFWYQYDVPWLFYQDAEYLFHTFASEWLNFEFVCSWLHSDLLTIHSAHEQEFIHSKIKALSKYGASWWIGLQEERANDEFRWRDGTPVIYQNWDTGRERPVNNQSQRCGFISSITGLWGSEECSVSMPSICKRKKVLLIEKKKDTPKQHGTCPKGWLYFNYKCLLLNIPKDPNSWKNWMHAQHFCAEEGGTLVAIESEVEQAFITMNLFGQTTNVWIGLQNDDYETWLNGKPVVYSNWSPFDIINIPSHNTTDVQKHIPLCALLSSNPNFHFTGKWYFEDCGKEGYGFVCEKMQDTSGHGVNTSDMYPMPNTLEYGNRTYKIINANMTWYAAIKTCLMHGTQLVSITDQYHQSFLTVVLNRLGYAHWIGLFTTDNGLNFDWSDGTKSSFTFWKDEESSLLGDCVFADTNGLWHSTACESFLQGAICHVPPETRQSEHPELCSETSIPWIKFKSNCYSFSTVLDRMSFEAAHEFCKKEGSNLLTIKDEAENAFLLEELFAFGSSVQMVWLNAQFDGNNETIKWFDGTPTDQSNWGIRKPDTDYFKPHHCVALRIPEGLQLSLCQEKKGFICKMEADIRTAEELPEKGPSHSIIPLAVVLTLIVIVAICTLSFCIYKHNGGFFRRLAGFRNPYYPATNFSTVHLEENILISDLEKSDQ

SEQ ID NO: 15 - protein, 146 aa, Sus scrofa
MKFLVLAVLLTVGAAQEGISSRALWQFRSMIKCAIPGSHPLMDFNNYGCYCGLGGSGTPVDELDRCCETHDNCYRDAKNLDSCKFLVDNPYTESYSYSCSNTEITCNSKNNACEAFICNCDRNAAICFSKAPYNKEHKNLDTKKYC

SEQ ID NO: 16 - protein, 145 aa, Bos taurus
MRLLVLAALLTVGAGQAGLNSRALWQFNGMIKCKIPSSEPLLDFNNYGCYCGLGGSGTPVDDLDRCCQTHDNCYKQAKKLDSCKVLVDNPYTNNYSYSCSNNEITCSSENNACEAFICNCDRNAAICFSKVPYNKEHKNLDKKNC

SEQ ID NO: 17 - protein, 146 aa, Rattus norvegicus
MKVLLLLAVVIMAFGSIQVQGSLLEFGQMILFKTGKRADVSYGFYGCHCGVGGRGSPKDATDWCCVTHDCCYNRLEKRGCGTKFLTYKFSYRGGQISCSTNQDSCRKQLCQCDKAAAECFARNKKSYSLKYQFYPNKFCKGKTPSC

SEQ ID NO: 18 - protein, 1012 aa, Homo sapiens
MAEAALEAVRSELREFPAAARELCVPLAVPYLDKPPTPLHFYRDWVCPNRPCIIRNALQHWPALQKWSLPYFRATVGSTEVSVAVTPDGYADAVRGDRFMMPAERRLPLSFVLDVLEGRAQHPGVLYVQKQCSNLPSELPQLLPDLESHVPWASEALGKMPDAVNFWLGEAAAVTSLHKDHYENLYCVVSGEKHFLFHPPSDRPFIPYELYTPATYQLTEEGTFKVVDEEAMEKAEVSRTCLLTVRVLQAHRLPSKDLVTPSDCYVTLWLPTACSHRLQTRTVKNSSSPVWNQSFHFRIHRQLKNVMELKVFDQDLVTGDDPVLSVLFDAGTLRAGEFRRESFSLSPQGEGRLEVEFRLQSLADRGEWLVSNGVLVARELSCLHVQLEETGDQKSSEHRVQLVVPGSCEGPQEASVGTGTFRFHCPACWEQELSIRLQDAPEEQLKAPLSALPSGQVVRLVFPTSQEPLMRVELKKEAGLRELAVRLGFGPCAEEQAFLSRRKQVVAAALRQALQLDGDLQEDEIPVVAIMATGGGIRAMTSLYGQLAGLKELGLLDCVSYITGASGSTWALANLYEDPEWSQKDLAGPTELLKTQVTKNKLGVLAPSQLQRYRQELAERARLGYPSCFTNLWALINEALLHDEPHDHKLSDQREALSHGQNPLPIYCALNTKGQSLTTFEFGEWCEFSPYEVGFPKYGAFIPSELFGSEFFMGQLMKRLPESRICFLEGIWSNLYAANLQDSLYWASEPSQFWDRWVRNQANLDKEQVPLLKIEEPPSTAGRIAEFFTDLLTWRPLAQATHNFLRGLHFHKDYFQHPHFSTWKATTLDGLPNQLTPSEPHLCLLDVGYLINTSCLPLLQPTRDVDLILSLDYNLHGAFQQLQLLGRFCQEQGIPFPPISPSPEEQLQPRECHTFSDPTCPGAPAVLHFPLVSDSFREYSAPGVRRTPEEAAAGEVNLSSSDSPYHYTKVTYSQEDVDKLLHLTHYNVCNNQEQLLEALRQAVQRRRQRRPH

SEQ ID NO: 19 - protein, 119 aa, Sus scrofa
ALWQFRSMIKCAIPGSHPLMDFNNYGCYCGLGGSGTPVDELDRCCETHDNCYRDAKNLSGCYPYTESYSYSCSNTEITCNSKNNACEAFICNCDRNAAICFSKAPYNKEHKNLDTKKYC

SEQ ID NO: 20 - protein, 119 aa, Sus scrofa; identical to SEQ ID NO: 19

SEQ ID NO: 21 - protein, 541 aa, Homo sapiens
MGSSEVSIIPGLQKEEKAAVERRRLHVLKALKKLRIEADEAPVVAVLGSGGGLRAHIACLGVLSEMKEQGLLDAVTYLAGVSGSTWAISSLYTNDGDMEALEADLKHRFTRQEWDLAKSLQKTIQAARSENYSLTDFWAYMVISKQTRELPESHLSNMKKPVEEGTLPYPIFAAIDNDLQPSWQEARAPETWFEFTPHHAGFPALGAFVSITHFGSKFKKGRLVRTHPERDLTFLRGLWGSALGNTEVIREYIFDQLRNLTLKGLWRRAVANAKSIGHLIFARLLRLQESSQGEHPPPEDEGGEPEHTWLTEMLENWTRTSLEKQEQPHEDPERKGSLSNLMDFVKKTGICASKWEWGTTHNFLYKHGGIRDKIMSSRKHLHLVDAGLAINTPFPLVLPPTREVHLILSFDFSAGDPFETIRATTDYCRRHKIPFPQVEEAELDLWSKAPASCYILKGETGPVVMHFPLFNIDACGGDIEAWSDTYDTFKLADTYTLDVVVLLLALAKKNVRENKKKILRELMNVAGLYYPKDSARSCCLA

SEQ ID NO: 22 - protein, 806 aa, Homo sapiens
MQFFGRLVNTFSGVTNLFSNPFRVKEVAVADYTSSDRVREEGQLILFQNTPNRTWDCVLVNPRNSQSGFRLFQLELEADALVNFHQYSSQLLPFYESSPQVLHTEVLQHLTDLIRNHPSWSVAHLAVELGIRECFHHSRIISCANCAENEEGCTPLHLACRKGDGEILVELVQYCHTQMDVTDYKGETVFHYAVQGDNSQVLQLLGRNAVAGLNQVNNQGLTPLHLACQLGKQEMVRVLLLCNARCNIMGPNGYPIHSAMKFSQKGCAEMIISMDSSQIHSKDPRYGASPLHWAKNAEMARMLLKRGCNVNSTSSAGNTALHVAVMRNRFDCAIVLLTHGANADARGEHGNTPLHLAMSKDNVEMIKALIVFGAEVDTPNDFGETPTFLASKIGRLVTRKAILTLLRTVGAEYCFPPIHGVPAEQGSAAPHHPFSLERAQPPPISLNNLELQDLMHISRARKPAFILGSMRDEKRTHDHLLCLDGGGVKGLIIIQLLIAIEKASGVATKDLFDWVAGTSTGGILALAILHSKSMAYMRGMYFRMKDEVFRGSRPYESGPLEEFLKREFGEHTKMTDVRKPKVMLTGTLSDRQPAELHLFRNYDAPETVREPRFNQNVNLRPPAQPSDQLVWRAARSSGAAPTYFRPNGRFLDGGLLANNPTLDAMTEIHEYNQDLIRKGQANKVKKLSIVVSLGTGRSPQVPVTCVDVFRPSNPWELAKTVFGAKELGKMVVDCCTDPDGRAVDRARAWCEMVGIQYFRLNPQLGTDIMLDEVSDTVLVNALWETEVYIYEHREEFQKLIQLLLSP

SEQ ID NO: 23 - protein, 124 aa, Homo sapiens [sequence omitted]

SEQ ID NO: 24 - protein, 124 aa, Homo sapiens [sequence omitted]

SEQ ID NO: 25 - protein, 146 aa, Mus musculus
MKVLLLLAASIMAFGSIQVQGNIAQFGEMIRLKTGKRAELSYAFYGCHCGLGGKGSPKDATDRCCVTHDCCYKSLEKSGCGTKLLKYKYSHQGGQITCSANQNSCQKRLCQCDKAAAECFARNKKTYSLKYQFYPNMFCKGKKPKC

SEQ ID NO: 26 - protein, 501 aa, Bos taurus
MGVLVVLLGVLSFLGRTLGGSPALHWDSTSCHLARPIPGRPLRSLSFLGKDAQGLALFHAHWDGHGRLQVCSRQDEPELTAAYGALCAGEITRGSFIHTPGPELQRALATLQSQWEACRGPAESPAGTREKRAAGQNGVPGIGRQWVKRGWTVPGTLWCGVGDSAGNSSELGVFQGPDLCCREHDRCPHNVSPFQYNYGIRNYRFHTISHCNCDARFQQCLQDQRDSVSDIMGVAFFNVLAIPCFVLEEQEACVEWYWWGGCRRYGSVPFARLQPRTFYNASWSSPATSLTPSPQNPALSRPQPMQHPQQWPSEWKESKSPSKTNATALQAPVASPGSDRASTVQLEVTHPGFQGTTGGRKPPGAHRACRSFRHLDQCEHQIGPQETKFQLFNSAHEPLFHCNCTRRLARFLRLHGPPVGASMLWELPGMTCFKLAPPLDCAEGKGCPRDPRAFKVSARHLLRLQQRRLQLQGTGTDNGQVWPSEDQGAPISFYNRCLQLT

SEQ ID NO: 27 - protein, 509 aa, Homo sapiens
MGVQAGLFGMLGFLGVALGGSPALRWYRTSCHLTKAVPGNPLGYLSFLAKDAQGLALIHARWDAHRRLQACSWEDEPELTAAYGALCAHETAWGSFIHTPGPELQRALATLQSQWEACRALEESPAGARKKRAAGQSGVPGGGHQREKRGWTMPGTLWCGVGDSAGNSSELGVFQGPDLCCREHDRCPQNISPLQYNYGIRNYRFHTISHCDCDTRFQQCLQNQHDSISDIVGVAFFNVLEIPCFVLEEQEACVAWYWWGGCRMYGTVPLARLQPRTFYNASWSSRATSPTPSSRSPAPPKPRQKQHLRKGPPHQKGSKRPSKANTTALQDPMVSPRLDVAPTGLQGPQGGLKPQGARWVCRSFRRHLDQCEHQIGPREIEFQLLNSAQEPLFHCNCTRRLARFLRLHSPPEVTNMLWELLGTTCFKLAPPLDCVEGKNCSRDPRAIRVSARHLRRLQQRRHQLQDKGTDERQPWPSEPLRGPMSFYNQCLQLTQAARRPDRQQKSWSQ

SEQ ID NO: 28 - protein, 68 aa, Oryctolagus cuniculus
  misc_feature (38)..(38): Xaa can be any naturally occurring amino acid
  misc_feature (67)..(67): Xaa can be any naturally occurring amino acid
HLLDFRKMIRYTTGKEATTSYGAYGCHCGVGGRGAPKXAKFLSYKFSMKKAAAACFKYQFYPNNRCXG

SEQ ID NO: 29 - protein, 151 aa, Mus musculus
MLLLLLLLLLGPGPGFSEATRRSHVYKRGLLELAGTLDCVGPRSPMAYMNYGCYCGLGGHGEPRDAIDWCCYHHDCCYSRAQDAGCSPKLDRYPWKCMDHHILCGPAENKCQELLCRCDEELAYCLAGTEYHLKYLFFPSILCEKDSPKCN

SEQ ID NO: 30 - protein, 138 aa, Homo sapiens
MKGLLPLAWFLACSVPAVQGGLLDLKSMIEKVTGKNALTNYGFYGCYCGWGGRGTPKDGTDWCCWAHDHCYGRLEEKGCNIRTQSYKYRFAWGVVTCEPGPFCHVNLCACDRKLVYCLKRNLRSYNPQYQYFPNILCS

SEQ ID NO: 31 - protein, 146 aa, Canis lupus
MKFLVLAALLTVAAAEGGISPRAVWQFRNMIKCTIPESDPLKDYNDYGCYCGLGGSGTPVDELDKCCQTHDHCYSEAKKLDSCKFLLDNPYTKIYSYSCSGSEITCSSKNKDCQAFICNCDRSAAICFSKAPYNKEHKNLDTKKYC

SEQ ID NO: 32 - protein, 146 aa, Rattus norvegicus
MKLLLLAALLTAGVTAHSISTRAVWQFRNMIKCTIPGSDPLREYNNYGCYCGLGGSGTPVDDLDRCCQTHDHCYNQAKKLESCKFLIDNPYTNTYSYKCSGNVITCSDKNNDCESFICNCDRQAAICFSKVPYNKEYKDLDTKKHC

SEQ ID NO: 33 - protein, 148 aa, Homo sapiens
MKLLVLAVLLTVAAADSGISPRAVWQFRKMIKCVIPGSDPFLEYNNYGCYCGLGGSGTPVDELDKCCQTHDNCYDQAKKLDSCKFLLDNPYTHTYSYSCSGSAITCSSKNKECEAFICNCDRNAAICFSKAPYNKAHKNLDTKKYCQS

SEQ ID NO: 34 - protein, 818 aa, Homo sapiens
MESLSPGGPTGHPYQGEASTCWQLTVRVLEARNLRWADLLSEADPYVILQLSTAPGMKFKTKTLTDTSHPVWNEAFRFLIQSQVKNVLELSIYDEDSVTEDDICFKVLYDISEVLPGKLLRKTFSQSPQGEEELDVEFLMEETSDRPENLITNKVIVARELSCLDVHLDSTGSTAVVADQDKLELELVLKGSYEDTQTSFLGTASAFRFHYMAALETELSGRLRSSRSNGWNGDNSAGYLTVPLRPLTIGKEVTMDVPAPNAPGVRLQLKAEGCPEELAVHLGFNLCAEEQAFLSRRKQVVAKALKQALQLDRDLQEDEVPVVGIMATGGGARAMTSLYGHLLALQKLGLLDCVTYFSGISGSTWTMAHLYGDPEWSQRDLEGPIRYAREHLAKSKLEVFSPERLASYRRELELRAEQGHPTTFVDLWALVLESMLHGQVMDQKLSGQRAALERGQNPLPLYLSLNVKENNLETLDFKEWVEFSPYEVGFLKYGAFVPPELFGSEFFMGRLMRRIPEPRICFLEAIWSNIFSLNLLDAWYDLTSSGESWKQHIKDKTRSLEKEPLTTSGTSSRLEASWLQPGTALAQAFKGFLTGRPLHQRSPNFLQGLQLHQDYCSHKDFSTWADYQLDSMPSQLTPKEPRLCLVDAAYFINTSSPSMFRPGRRLDLILSFDYSLSAPFEALQQTELYCRARGLPFPRVEPSPQDQHQPRECHLFSDPACPEAPILLHFPLVNASFKDHSAPGVQRSPAELQGGQVDLTGATCPYTLSNMTYKEEDFERLLRLSDYNVQTSQGAILQALRTALKHRTLEARPPRAQT

SEQ ID NO: 35 - protein, 855 aa, Mus musculus
MPWTLQPKWLAGKGLPLLGAILLRKTEKSEPQWKHRRQETHPYYDLQVKVLRARNIQHTDKLSKADCYVRLWLPTASVSPSQTRTVVNSSDPEWNETFHYQIHGAVKNVLELALYDEDVLDSDNVFSILFDMSTLQLGQPCTKNFTRQQDPKELEVEFTLEKSQTPASEVVTNGVLVAHPCLRIQGTVTGDKTASLGELGSRQIQLAVPGAYEKPQPLQPTSEPGLPVNFTFHMNPVLSPKLHIKLQEQLQVFHSGPSDELEAQTSKMDKASILLSSLPLNEELTKLVDLEEGQQVTLRMKADMSSSGDLDLRLGFDLCDGEQEFLDKRKQVASKALQRVMGLSEALHCDQVPVVAVLGSGGGTRAMTSLYGSLAGLQELGLLDAVTYLSGVSGSSWCISTLYRDPSWSQKALQGPIKYASERVCSSKIGMLSPKQFEYYSREKRAWESRGHSMSFTDLWGLIIEYFLNQEENPAKLSDQQETVSQGQNPYPIYASINVHKNISGDYFAEWCEFTPYEVGFPKYGVYVPTELFGSEFFMGRLLHFWPEPRICYLQGMWGSAFAASLYEIFLKLGGLSLSFLDWHRGSVSVTDDWPKLRKQDPTRLPTRLFTPMSSFSQAVLDIFTSRITCAQTFNFTRGLCMYKDYTARKDFVVSEDAWHSHNYGYPDACPNQLTPMKDFLSLVDGGFAINSPFPLVLQPQRAVDLIVSFDYSLEGPFEVLQVTEKYCRDRGIPFPRIEVDPKDSEDPRECYLFTEAEDPCSPIVLHFPLVNRTFRTHLAPGVERQTAEEKAFGDFIINGPDTAYGMMDFTYEPKEFDRLVTLSRYNVLNNKETIRHALQLALDRRRQAGGRVGG

SEQ ID NO: 36 - protein, 825 aa, Mus musculus
MWSGDRRVGMESLSPERLHGHPYQEEASVFCRLTVKILEARSLPRADLLSQADPYVTVQLPTASGMKFKTQTVTNSSHPVWNETFSFLIQSQVKNILELTIYDEDVITKDDICFKVSYDVSEILPGQLLQKTFSLNPQGPEELDVELLMERTWDPPENLITNNVLVARELSHLDVSLDRAGNTAMAAGQDKLELELMLKGSYEDTQTFFPDTAFTFSFHYMGGQDTELNGYLRGPRNSGWNSDTSVTPFNVPLMSLAAGKEMTIDIPAMKAPEGKLQLKTDCCPKELSVRLSYGLCPEEQAFLSRRKKVVAAALKQALQLDEDLNEDEVPVVGINAEGGGMRAMISLYGHLLALQKLGLLDCVTYFSGISGSTWTMAHLYRDPEWSQRDLEGPISHAREHVAKTLLKEFLPEHLASYRQTLKLREEQGYTVTVADLWGLVLESKLHGQVTDQKLSGQRAALERGQNPLPLYLSLNVKENHLGTLHFKEWVEFSPYEVGFLKYGGFVPSELFGSEFFMGRLMKRLPESQICFLEGIWSNLFSVNLMDIWYDITYGKDSNNFPVDVRNSEKEFSGSAGTSSGVEAPWLESGTALAQALKGFLTGRPFHQRSANFLHGLQLHRDYCNQRHFSTWADCNLDDTPNQLTPQDPQLCLIDAGCFMNSSCPSLFRPGRQVDLIISFNYNQSLPFKGLQQSEKYSRARGLPFPRVEPSPEDHSQPQECYLFSDPTCPEAPVVLHFPLVNDSFRDHSAPGVRRSPDELKAGQVNLTGAASPYFMYNMTYKNEDFDRLLQLSDYNVQNNQGTILQALRTVLKRRASETRPLGVKT

SEQ ID NO: 37 - protein, 155 aa, Homo sapiens
MLLLLLPSLLLLLLLPGPGSGEASRILRVHRRGILELAGTVGCVGPRTPIAYMKYGCFCGLGGHGQPRDAIDWCCHGHDCCYTRAEEAGCSPKTERYSWQCVNQSVLCGPAENKCQELLCKCDQEIANCLAQTEYNLKYLFYPQFLCEPDSPKCD

SEQ ID NO: 38 - protein, 144 aa, Oryctolagus cuniculus
MKFLVLAALLTAGTAASGVSPTALWQFRGMIQCTIPGSSPYLEFNGYGCYCGLGGSGTPVDELDRCCQTHDQCYTQAKKLSSCSFLVDNPYTNSYSYSCSGTTVTCSSKNKECEAFICDCDRKAAICFSKRPYNKEYKPISKYC

SEQ ID NO: 39 - protein, 137 aa, Mus musculus
MKGLLTLAWFLACSVPAVPGGLLELKSMIEKVTGKNAFKNYGFYGCYCGWGGRGTPKDGTDWCCQMHDRCYGQLEEKDCAIRTQSYDYRYTNGLVICEHDSFCPMRLCACDRKLVYCLRRNLWTYNPLYQYYPNFLC

SEQ ID NO: 40 - protein, 137 aa, Rattus norvegicus
MKRLLTLAWFLACSVPAVPGGLLELKSMIEKVTGKNAVKNYGFYGCYCGWGGHGTPKDGTDWCCRMHDRCYGLLEEKHCAIRTQSYDYRFTQDLVICEHDSFCPVRLCACDRKLVYCLRRNLWSYNRLYQYYPNFLC

SEQ ID NO: 41 - protein, 145 aa, Cavia porcellus
MKLLLLLLVVMASDLPQAHGHLKQFTEMIKLTTGKNGLTSYGAYGCHCGVGGKGTPKDATDRCCVRHDCCYDRLMKRGCGTKFLNYRFTHKGSSITCSVKQNSCQKQLCECDKAAAYCFAANLKSYSRRYQFYYNGLCRGKTPSC

SEQ ID NO: 42 - protein, 150 aa, Mus musculus
MKGIAIFLVFIFYWTTSTLSSFWQFQRMVKHVTGRSAFFSYYGYGCYCGLGGKGLPVDATDRCCWAHDCCYHKLKEYGCQPILNAYQFTIVNGTVTCGCTVASSCPCGQKACECDKQSVYCFKENLATYEKAFKQLFPTRPQCGRDKLQC

SEQ ID NO: 43 - protein, 146 aa, Cavia porcellus
MKLLVLAALLSVSAAAHIITPRALWQFRDMIKCAIPGSRPYSEYNNYGCFCGLGGSGTPVDELDRCCEIHDACYTQAKHLESCKSVIDNPYTNSYSFSCSGTNIICSSKNKECEEFICNCDRAAAICFSKAPYNENNKNINKKERC

SEQ ID NO: 44 - protein, 752 aa, Mus musculus
MQFFGRLVNTLSSVTNLFSNPFRVKEVSLTDYVSSERVREEGQLILLQNVSNRTWDCVLVSPRNPQSGFRLFQLESEADALVNFQQFSSQLPPFYESSVQVLHVEVLQHLTDLIRNHPSWTVTHLAVELGIRECFHHSRIISCANSTENEEGCTPLHLACRKGDSEILVELVQYCHAQMDVTDNKGETAFHYAVQGDNPQVLQLLGKNASAGLNQVNNQGLTPLHLACKMGKQEMVRVLLLCNARCNIMGPGGFPIHTAMKFSQKGCAEMIISMDSNQIHSKDPRYGASPLHWAKNAEMARMLLKRGCDVDSTSSSGNTALHVAVMRNRFDCVMVLLTYGANAGARGEHGNTPLHLAMSKDNMEMVKALIVFGAEVDTPNDFGETPALIASKISKQLQDLMPISRARKPAFILSSMRDEKRSHDHLLCLDGGGVKGLVIIQLLIAIEKASGVATKDLFDWVAGTSTGGILALAILHSKSMAYMRGVYFRMKDEVFRGSRPYESGPLEEFLKREFGEHTKMTDVKKPKVMLTGTLSDRQPAELHLFRNYDAPEAVREPRCNQNINLKPPTQPADQLVWRAARSSGAAPTYFRPNGRFLDGGLLANNPTLDAMTEIHEYNQDMIRKGQGNKVKKLSIVVSLGTGKSPQVPVTCVDVFRPSNPWELAKTVFGAKELGKMVVDCCTDPDGRAVDRARAWCEMVGIQYFRLNPQLGSDIMLDEVSDAVLVNALWETEVYIYEHREEFQKLVQLLLSP

SEQ ID NO: 45 - protein, 849 aa, Homo sapiens
MLWALWPRWLADKMLPLLGAVLLQKREKRGPLWRHWRRETYPYYDLQVKVLRATNIRGTDLLSKADCYVQLWLPTASPSPAQTRIVANCSDPEWNETFHYQIHGAVKNVLELTLYDKDILGSDQLSLLLFDLRSLKCGQPHKHTFPLNHQDSQELQVEFVLEKSQVPASEVITNGVLVAHPCLRIQGTLRGDGTAPREEYGSRQLQLAVPGAYEKPQLLPLQPPTEPGLPPTFTFHVNPVLSSRLHVELMELLAAVQSGPSAELEAQTSKLGEGGILLSSLPLGQEEQCSVALGEGQEVALSMKVEMSSGDLDLRLGFDLSDGEQEFLDRRKQVVSKALQQVLGLSEALDSGQVPVVAVLGSGGGTRAMSSLYGSLAGLQELGLLDTVTYLSGVSGSTWCISTLYRDPAWSQVALQGPIERAQVHVCSSKMGALSTERLQYYTQELGVRERSGHSVSLIDLWGLLVEYLLYQEENPAKLSDQQEAVRQGQNPYPIYTSVNVRTNLSGEDFAEWCEFTPYEVGFPKYGAYVPTELFGSELFMGRLLQLQPEPRICYLQGMWGSAFATSLDEIFLKTAGSGLSFLEWYRGSVNITDDCQKPQLHNPSRLRTRLLTPQGPFSQAVLDIFTSRFTSAQSFNFTRGLCLHKDYVAGREFVAWKDTHPDAFPNQLTPMRDCLYLVDGGFAINSPFPLALLPQRAVDLILSFDYSLEAPFEVLKMTEKYCLDRGIPFPSIEVGPEDVEEARECYLFAKAEDPRSPIVLHFPLVNRTFRTHLAPGVERQTAEEKAFGDFVINRPDTPYGMMNFTYEPQDFYRLVALSRYNVLNNVETLKCALQLALDRHQARERAGA

SEQ ID NO: 46 - protein, 1012 aa, Mus musculus
MAEAALEAVRRALQEFPAAARDLNVPRVVPYLDEPPSPLCFYRDWVCPNRPCIIRNALQHWPALQKWSLSYLRATVGSTEVSVAVTPDGYADAVRGDRFVMPAERRLPISHVLDVLEGRAQHPGVLYVQKQCSNLPTELPQLLSDIESHVPWASESLGKMPDAVNFWLGDASAVTSLHKDHYENLYCVVSGEKHFLLHPPSDRPFIPYNLYTPATYQLTEEGTFRVVDEEAMEKVPETCLLTVRVLRASGLPSKDLVTSSDCYVTLNLPTASSHTLQTRTVKNSRNPVWNQNFHFRIHRQLKNVIELKAFDHDLVTRDDPVLSVLFDVGTLQIGTQRQSFSLGTQEKGCLEVEFRLQTLTDCEEQLISNGIVVARELSCLHVELKRTGDPKRSERKVQLVVAGACEGPQDASAGTGSFHFHYPACWEQELNVHLQDDPHEQLKVPLRTLPSSQLVRLVFPTSQEPLMRLELKKEEGPKELAVRLGCGPCPEEQAFLSKRKQVVAAALKKALQLDQDLHEDEIPVIAVMATGGGIRAMTSLYGQLAGLQELGLLDCISYITGASGSTWALANLYEDPEWSQKDLAGPTEVLKTQVTKSKLGALAPSQLWRYRQELAERARLGHPTCFTNLWALINEALLHDKPHEHKLSDQREALSRGQNPLPIYCALNSKEQGLSTFDFGEWCEFSPYEVGFPKYGAFISSELFGSEFFMGRLVKQLPESRICFLEGIWSNLFAASLQDSLYWSSEPSQFWDRWAQDQANLDKEQVPHLKIAEPPTMAGRIAELFTDLLTKRPLAHATHNFTRGLHFHKDYFQNSHFSAWKASKLDRLPNQLTPTEPHLCLLDVGYLINTSCPPLLQPTRDVDLILSLDYNLYGAFQQLQLLSRFCQEQGIPFPSISPSPEEQRQPQECHLFCDPAQPEAPAVLHFPLVNDSFQDYSAPGVPRTSEEKAAGEVNLSSSDSPYHYTKVTYSQEDVDKLLRLTHYNICNNQDRLREAMHQAVQRRRKRKQFRPE

SEQ ID NO: 47 - protein, 751 aa, Rattus norvegicus
MQFFGRLVNTLSSVTNLFSNPFRAKEVSLADYASSERVREEGQLILLQNASNRTWDCDLVSPRNPQSDFRLFQLESEADVLVNFQQYSSQLPPFYESSEQVLHVEVLQLTDLIRNHPSWTVTHLAVELGIRECFHHSRIITCANSTENEEGCTPLHLACRKGDSEILVELVQYCHAQMDVTDNKGETAFHYAVQGDNPQVLQLLGKNASAGLNQVNNQGLTPLHLACQMGKQEMVRVLLLCNARCNIMGPGGFPIHTAMKFSQKGCAEMIISMDSNQIHSKDPRYGASPLHWAKNAEMARMLLKRGCDVDSTSASGNTALHVAVTRNRFDCVMVLLTYGANAGARGEHGNTPLHLAMSKDNMEMVKALIVFGAEVDTPNDFGETPAFIASKISKQLQDLMPVSRARKPAFILSSMRDEKRTHDHLLCLDGGGVKGLVIIQLLIAIEKASGVATKDLFDWVAGTSTGGILALAILHSKSMAYMRGVYFRMKDEVFRGSRPYESGPLEEFLKREFGEHTKMTDVKKPKVMLTGTLSDRQPAELHLFRNYDAPEAVREPRCTPNINLKPPTQPADQLVWRAARSSGAAPTYFRPNGRFLDGGLLANNPTLDAMTEIHEYNQDMIRKGQGNKVKKLSIVVSLGTGKSPQVPVTCVDVFRPSNPWELAKTVFGAKELGKMVVDCCTDPDGRAVDRARAWCEMVGIQYFRLNPQLGSDIMLDEVSDAVLVNALWETEVYIYEYREEFQKLVQLLLSP

SEQ ID NO: 48 - protein, 144 aa, Bos taurus
MKTLLLLAVIMAIGLLQVHGDLLNFRKMIKLTTGKEPATRYSFYGCYCGMSGRGTPKDATDWCCRAHDCCYKNLESRGCRTKFLKYNVTYQEDQIVCEDADDCKSQVCQCDKIAANCFAANLKTYNKKLRFYNKFRCRGAAPAC

SEQ ID NO: 49 - protein, 151 aa, Rattus norvegicus
MLLLLLLLLLGPGSCLSEATRRSHVYKRGLLELAGTLDCVGPRSPMAYMNYGCYCGLGGHGEPRDAIDWCCYYHDCCYSQAQDAGCSPKLYRYPWKCMDHRILCGPAENKCQELLCRCDETLAYCLADTEYHLKYLFFPSVLCEKDSPKCN

SEQ ID NO: 50 - protein, 146 aa, Mus musculus
MKLLLLAALLTAGAAAHSISPRAVWQFRNMIKCTIPGSDPLKDYNNYGCYCGLGGWGTPVDDLDRCCQTHDHCYSQAKKLESCKFLIDNPYTNTYSYSCSGSEITCSAKNNKCEDFICNCDREAAICFSKVPYNKEYKNLDTGKFC

SEQ ID NO: 51 - protein, 150 aa, Rattus norvegicus
MKGIAVFLVFIFCWTTSTLSSFWQFQRMVKHITGRSAFFSYYGYGCYCGLGGRGIPVDATDRCCWAHDCCYHKLKEYGCQPILNAYQFAIVNGTVTCGCTMGGGCLCGQKACECDKLSVYCFKENLATYEKTFKQLFPTRPQCGRDKLHC

SEQ ID NO: 52 - protein, 838 aa, Homo sapiens
MLLRQMHARVSHSLPDPCQAEDSRPSATCALKAPQTSWDGLLREGLSPCHLLTVRVIRMKNVRQADMLSQTDCFVSLWLPTASQKKLRTRTISNCPNPEWNESFNFQIQSRVKNVLELSVCDEDTVTPDDHLLTVLYDLTKLCFRKKTHVKFPLNPQGMEELEVEFLLEESPSPPETLVTNGVLVSRGHGWLLLSGEQDQGRKQWAKDLLVMVNESFENTQRVRPCLEPCCPTSACFHYPKYFQSQVHVEVPKSHWSCGLCCRSRKKGPISQPLDCLSDGQVMTLPVGGGESLGSPETLDVRLGFSLCPAELEFLQKRKVVVAKALKQVLQLEEDLQEDEVPLIAIMATGGGTRSMTSMYGHLLGLQKLNLLDCASYITGLSGATWTMATLYRDPDWSSKNLEPAIFEARRHVVKDKLPSLFPDQLRKFQEELRQRSQEGYRVTFTDFWGLLIETCLGDERNECKLSDQRAALSCGQNPLPIYLTINVKDDVSNQDFREWFEFSPYEVGLQKYGAFIPSELFGSEFFMGRLVKRIPESRICYMLGLWSSIFSLNLLDAWNLSHTSEEFFHRWTREKVQDIEDEPILPEIPKCDANILETTVVIPGSWLSNSFREILTHRSFVSEFHNFLSGLQLHTNYLQNGQFSRWKDTVLDGFPNQLTESANHLCLLDTAFFVNSSYPPLLRPERKADLIIHLNYCAGSQTKPLKQTCEYCTVQNIPFPKYELPDENENLKECYLMENPQEPDAPIVTFFPLINDTFRKYKAPGVERSPEELEQGQVDIYGPKTPYATKELTYTEATFDKLVKLSEYNILNNKDTLLQALRLAVEKKKRLKGQCPS

SEQ ID NO: 53 - protein, 875 aa, Mus musculus
MQSIPHSDEADVAGMTHASEGHHGLGTSMLVPKNPQGEEDSKLGRNCSGFEDAQDPQTAVPSSPLLSMASCSSQEGSSPCHLLTVRIIGMKNVRQADILSQTDCFVTLWLPTASQKKLKTRTISNCLHPEWDESFTFQIQTQVKNVLELSVCDEDTLTQNDHLLTVLYDLSKLCLRNKTHVKFPLNPEGMEELEVEFLLEENFSSSETLITNGVLVSRQVSCLEVHAESRRPRKRKKNKDLLVMVTDSFENTQRVPPCQEPCYPNSACFHYPKYSQPQLYAEAPKSHCNFRLCCCGTHRNDPVCQPLNCLSDGQVTTLPVGENYELHMKSSPCSDTLDVRLGFSLCQEEVEFVQKRKMVVAKTLSQMLQLEEGLHEDEVPIIAIMATGGGTRSMVSLYGHLLGLQKLNFLDASTYITGLSGATWTMATLYSDPEWSSKNLETVVFEARRHVVKDKMPALFPDQLYKWREDLQKHSQEGYKTTFTDFWGKLIEYSLGDKKNECKLSDQRAALCRGQNPLPIYLTINVKDDVSNQDFREWFEFSPYEVGMQKYGAFIPSELFGSEFFMGRLMKRIPEPEMCYMLGLWSSIFSLNLLDAWNLSHTSEEFFYRWTRERLHDIEDDPILPEIPRCDDNPLETTVVIPTTWLSNTFREILTRRPFVSEFHNFLYGMQLHTDYLQNRQFSMWKDTVLDTFPNQLTQFAKHLNLLDTAFFVNSSYAPLLRPERKVDLIIHLNYCAGSQTKPLKQTCEYCTEQKIPFPSFSILEDDNSLKECYVMENPQEPDAPIVAYFPLISDTFQKYKAPGVERSPDELELGQLNIYGPKSPYATKELTYTEAAFDKLVKLSEYNILNNRDKLIQALRLAMEKKRMRSQCPS

SEQ ID NO: 54 - protein, 786 aa, Oryctolagus cuniculus
MSINLTIDICIYLLSNARNLCGKHRSKQLHLVCSPNHCWKIRHVSLQRGLHPHKVRCKWTKSETHSCSKHYYSPSNHGLHIGILKLSTSAPKGLTKVSIRMSRIKSTLNSVSKAVFGSQNEMISRLAQFKPSSRILRKVSDSGWLKQESIKQAIRSLKKYSDKSTEKSPVPEGRNHIIDKEDDIGKQSLFHYTGNITTKFGESFYFLSNHINSYFKRAEKMSQDKENSHFQEKSELEGKKVEEGKSSSLDPGILTSQADKPDPKSSAGTMDKATSPSGTPESLPISTKQSIANFLSRPTEGVQALVGGYIGGLVPKLKYDSKSQAEEQEEPAKSEPAGSKDKTVEEKKHLSLQREKIIARVSIDNRTRALVQALRRTADPKLCITRVEELTFHLLEFPEGKGVAVKERLIPCLLRLRQMKDETLQAAVREILALIGYVDPVKGRGIRILTIDGGGTRGVVALQTLRKLVELTQKPVHQLFDYICGVSTGAILAFMLGLFHLPLDECEELYRKLGSDIFSQNVIVGTVKMSWSHAFYDSQTWEKILKERMGSALMIETARNPMCPKVAAVSTIVNRGSTPKAFVFRNYGHFPGSQSHYLGGCQYKMWQAIRASSAAPGYFAEYALGNDLHQDGGLLLNNPSALAMHECKCLWPDAPLECIVSLGTGRYESDVRNNTTYTSLKTKLSNVINSATDTEEVHIMLDGLLPPDTYFRFNPVMCENIPLDESRNEKLDQLQLEGSKYIERNEHKMKKVAKILSQEKTTLQKINDWIKLKTDMYEGLPFFSKL

SEQ ID NO: 55 - protein, 782 aa, Canis familiaris
MGDHARLTRDSIFFQTEGAGGGASSPAPQKMQFFGRLVNTLSSVTNLFSNPFRVKEVAVADYTSSARVRDEGQLILFQNIPNRTWDCILVNPRNSQSGFRLFQLETEADALVNFQQYSSQLPPFYESSKHVLHTEVLQQLTDLIRSHPSWSAAHLAVELGIRECFHHSRIISCANNRENEEGCTPLHLACRKGDGEILVELVQYCHAQMDVTDNNGETAFHYAVQGDNSQVLQLLGKNASAGLNRVNNQGQTPLHLACQMGKQEMVRVLLLCNARCNIMGPTGYPIHTAMKFCHKGCAEMIISMDSNQIHSKDPRYGASPLHWAKNAEMARMLLKRGCDVNSTSCVGNTALHVAVMRNRFDCVMVLLTYGANADARGEHGNTPLHLAMSKDNVEMIKALIVFGAEVDTPNDFGETPASIASKISKQLQDIVQISRSRKPAFILSSMRDEKRTHDHLLCLDGGGVKGLVIIQLLIAIEKASGVATKDLFDWVAGTSTGGILALAILHSKSMAYMRGVYFRMKDEVFRGSRPYESGPLEEFLKREFGEHTKMTDVKKPKVMLTGTLSDRQPAELHLFRNYEAPESVREPRFSQNINLKPPTQPSDQLVWRAARSSGAAPTYFRPNGRFLDGGLLANNPTLDAMTEIHEYNQDLIRKGQGNKVKKLSIVVSLGTGRSPQVPVTCVDVFRPSNPWELAKTVFGAKELGKMVVDCCTDPDGRAVDRARAWCEMVGIQYFRLNPQLGTDIMLDEVSDTVLVNALWETEVYIYEHREQFQKLIQLLLSP

SEQ ID NO: 56 - protein, 1450 aa, Rattus norvegicus
MESWPGVSLVGLLLLLLLGQGPSQIHGSSGENTSQPQQVFRTLKNFSFPCKPKKLELSVLSKSVHSLRPSDIKLVAAIGNLETPPAPGSGVVNMEKPQSLESELQNVCIGIMTALSDIIRHFNPSVLMPTCSPGKGTAGHTTIAEDLWIQAKELVRHLKDNPELDFEKDWKLITVLFSNTSQCHLCSSDQQKRHLMKHMEMLSGVLDYLHREVPRAFVNLVDLSEVLTMAQQHQETGFSPAPEICKCSEEITKLSKAVMQWSYQEAWEDLLASSKFNKHETFAVVFQSFFSEVELPLERPSPQDSTTLALRIWNSMMEPVGRKDGTLNEAERKTMKCPSQESPYLFTYRNSNYQARQLKPIGKFQMKEGTKFTCPDKDPSDSIPTTVHRLRPADIKVIGAMGDSLTAGNGAGSSPGNVLDVLTQYRGLSWSVGGDETIETVTTLANILREFNPSLKGFSVGTGKENTPRASFNQAVAGAKSDGLAAQAKKLVSLMKDDKTINFQEDWKIITVFIGGNDLCGSCNNLARFSPQTFTDNIKTALDILHAEVPRAFVNMVSVIEITPLRELFNEPKVSCPRMILRSLCPCVLNLGENSAELAQLVERNRQYQEETGKLIESGRYDTRDDFTVVLQPMFENVVMPRTLEGLPDSSFFAPDCFHFNVKTHARSAIALWKNMLEPVGRKTRHQNFEIKVPIMCPNQTSPFLSTTKNSNLGHGTSMSCEEKAPSASPPTSVHTLRPADIQVVAALGDSVTAGNGISSQEGDLADVTTQYRGLSYSAGGDKFLENVTTLPNILREFNGNLTGYSVGTGDVNSASAFLNQAVPGAKAENLASQVQTLIQKMKNDTRVNFHQDWKVITVMIGASDLCDFCKDSNRYSAANFSDHLRNALDILHKEVPRALVNLVDFMNPSIIRQVFLKNPDKCPVNQTSVLCNCVLTPGEDSHELARLEAFTKSYQSSMLQLVESGRYDTREDFSVVLQPFLFNIRLPILENGNPDTSFFAPDCILLSQKFHTQLARALWANMLEPLGKKMDTLDPKELIALACPTKDKPFLRTFRNSNYTYPIKPAIENWGSDFLCTEQSPSSKVPTSVHELRPSDIKVVAAMGDFLTTATGARPSESSSLDTPWRGLSWSIGGDGTLETHTTLPNILKKFNPSILGFSTGTLENTAGLNVAEEGARAQDMPAQAQALVKKMKSTPTINIQEDWKLITLLIGNNDLCLYCEDPENYSTREYVKYIQHALDIFYEELPRVFINVVEVMELSGLLHDQGGKCAMPLAVQKNCSCLKRSQNLMAMQELKKVNGNLQSALSELSYWHRYMQREDFAVTVQPFFRNTFVPLDERGGLDLTFFSEDCFHFSVRGHAEMAIALWNNMLEPVGKKTTSNNFTYNRTKLKCPSPENPFLYTVRNSQILLDKAKENSNTLYWAVPVAAVGGLVVGILGMMLWRTVRLVQ

SEQ ID NO: 57 - protein, 146 aa, Sus scrofa; identical to SEQ ID NO: 15

SEQ ID NO: 58 - protein, 144 aa, Homo sapiens; identical to SEQ ID NO: 6

SEQ ID NO: 59 - protein, 752 aa, Rattus norvegicus
MSFIDPYQHIIVEHQYSHKFTVVVLRATKVTKGTFGDMLDTPDPYVELFISTTPDSRKRTRHFNNDINPVWNETFEFILDPNQENVLEITLMDANYVMDETLGTATFPVSSMKVGEKKEVPFIFNQVTEMILEMSLEVCSCPDLRFSMALCDQEKTFRQQRKENIKENMKKLLGPKKSEGLYSTRDVPVVAILGSGGGFRAMVGFSGVMKALYESGILDCATYVAGLSGSTWYMSTLYSHPDFPEKGPEEINEELMKNVSHNPLLLLTPQKVKRYVESLWKKKSSGQPVTFTDIFGMLIGETLIQNRMSTTLSSLKEKVSAARCPLPLFTCLHVKPDVSELMFADWVEFSPYEIGMAKYGTFMTPDLFGSKFFMGTVVKKYEENPLHFLMGVWGSAFSILFNRVLGVSGSQNKGSTMEEELENITAKHIVSNDSSDSDDEAQGPKGTENEDAEREYQNDNQASWVHRMLMALVSDSALFNTREGRAGKVHNFMLGLNLNTSYPLSPLRDFSPQDSFDDDELDAAVADPDEFERIYEPLDVKSKKIHVVDSGLTFNLPYPLILRPQRGVDLIISFDFSARPSDTSPPFKELLLAEKWAKMNKLPFPKIDPYVFDREGLKECYVFKPKNPDVEKDCPTIIHFVLANINFRKYKAPGVLRETKEEKEIADFDIFDDPESPFSTFNFQYPNQAFKRLHDLMYFNTLNNIDVIKDAIVESIEYRRQNPSRCSVSLSNVEARKFFNKEFLSKPTAESI

SEQ ID NO: 60 - protein, 749 aa, Homo sapiens; identical to SEQ ID NO: 4

SEQ ID NO: 61 - protein, 752 aa, Homo sapiens
MQFFGRLVNTFSGVTNLFSNPFRVKEVAVADYTSSDRVREEGQLILFQNTPNRTWDCVLVNPRNSQSGFRLFQLELEADALVNFHQYSSQLLPFYESSPQVLHTEVLQHLTDLIRNHPSWSVAHLAVELGIRECFHHSRIISCANCAENEEGCTPLHLACRKGDGEILVELVQYCHTQMDVTDYKGETVFHYAVQGDNSQVLQLLGRNAVAGLNQVNNQGLTPLHLACQLGKQEMVRVLLLCNARCNIMGPNGYPIHSAMKFSQKGCAEMIISMDSSQIHSKDPRYGASPLHWAKNAEMARMLLKRGCNVNSTSSAGNTALHVAVMRNRFDCAIVLLTHGANADARGEHGNTPLHLAMSKDNVEMIKALIVFGAEVDTPNDFGETPTFLASKIGRQLQDLMHISRARKPAFILGSMRDEKRTHDHLLCLDGGGVKGLIIIQLLIAIEKASGVATKDLFDWVAGTSTGGILALAILHSKSMAYMRGMYFRMKDEVFRGSRPYESGPLEEFLKREFGEHTKMTDVRKPKVMLTGTLSDRQPAELHLFRNYDAPETVREPRFNQNVNLRPPAQPSDQLVWRAARSSGAAPTYFRPNGRFLDGGLLANNPTLDAMTEIHEYNQDLIRKGQANKVKKLSIVVSLGTGRSPQVPVTCVDVFRPSNPWELAKTVFGAKELGKMVVDCCTDPDGRAVDRARAWCEMVGIQYFRLNPQLGTDIMLDEVSDTVLVNALWETEVYIYEHREEFQKLIQLLLSP

SEQ ID NO: 62 - protein, 806 aa, Homo sapiens; identical to SEQ ID NO: 22

SEQ ID NO: 63 - protein, 807 aa, Rattus norvegicus
MQFFGRLVNTLSSVTNLFSNPFRVKEVSLADYASSERVREEGQLILLQNASNRTWDCVLVSPRNPQSGFRLFQLESEADALVNFQQYSSQLPPFYESSVQVLHVEVLQHLTDLIRNHPSWTVTHLAVELGIRECFHHSRIISCANSTENEEGCTPLHLACRKGDSEILVELVQYCHAQMDVTDNKGETAFHYAVQGDNPQVLQLLGKNASAGLNQVNNQGLTPLHLACQMGKQEMVRVLLLCNARCNIMGPGGFPIHTAMKFSQKGCAEMIISMDSNQIHSKDPRYGASPLHWAKNAEMARMLLKRGCDVDSTSASGNTALHVAVTRNRFDCVMVLLTYGANAGARGEHGNTPLHLAMSKDNMEMVKALIVFGAEVDTPNDFGETPAFIASKISKLITRKALLTLLKTVGADYHFPFIQGVSTEQSSAAGPHPFFSLDRTQPPTISLNNLELQDLMPVSRARKPAFILSSMRDEKRSHDHLLCLDGGGVKGLVIIQLLIAIEKASGVATKDLFDWVAGTSTGGILALAILHSKSMAYMRGVYFRMKDEVFRGSRPYESGPLEEFLKREFGEHTKMTDVKKPKVMLTGTLSDRQPAELHLFRNYDAPEAVREPRCTPNINLKPPTQPADQLVWRAARSSGAAPTYFRPNGRFLDGGLLANNPTLDAMTEIHEYNQDMIRKGQGNKVKKLSIVVSLGTGKSPQVPVTCVDVFRPSNPWELAKTVFGAKELGKMVVDCCTDPDGRAVDRARAWCEMVGIQYFRLNPQLGSDIMLDEVSDAVLVNALWETEVYIYEHREEFQKLVQLLLSP

SEQ ID NO: 64 - protein, 441 aa, Homo sapiens
MVPPKLHVLFCLCGCLAVVYPFDWQYINPVAHMKSSAWVNKIQVLMAAASFGQTKIPRGNGPYSVGCTDLMFDHTNKGTFLRLYYPSQDNDRLDTLWIPNKEYFWGLSKFLGTHWLMGNILRLLFGSMTTPANWNSPLRPGEKYPLVVFSHGLGAFRTLYSAIGIDLASHGFIVAAVEHRDRSASATYYFKDQSAAEIGDKSWLYLRTLKQEEETHIRNEQVRQRAKECSQALSLILDIDHGKPVKNALDLKFDMEQLKDSIDREKIAVIGHSFGGATVIQTLSEDQRFRCGIALDAWMFPLGDEVYSRIPQPLFFINSEYFQYPANIIKMKKCYSPDKERKMITIRGSVHQNFADFTFATGKIIGHMLKLKGDIDSNVAIDLSNKASLAFLQKHLGLHKDFDQWDCLIEGDDENLIPGTNINTTNQHIMLQNSSGIEKYN

SEQ ID NO: 65 - protein, 541 aa, Homo sapiens
MGSSEVSIIPGLQKEEKAAVERRRLHVLKALKKLRIEADEAPVVAVLGSGGGLRAHIACLGVLSEMKEQGLLDAVTYLAGVSGSTWAISSLYTNDGDMEALEADLKHRFTRQEWDLAKSLQKTIQAARSENYSLTDFWAYMVISKQTRELPESHLSNMKKPVEEGTLPYPIFAAIDNDLQPSWQEARAPETWFEFTPHHAGFSALGAFVSITHFGSKFKKGRLVRTHPERDLTFLRGLWGSALGNTEVIREYIFDQLRNLTLKGLWRRAVANAKSIGHLIFARLLRLQESSQGEHPPPEDEGGEPEHTWLTEMLENWTRTSLEKQEQPHEDPERKGSLSNLMDFVKKTGICASKWEWGTTHNFLYKHGGIRDKIMSSRKHLHLVDAGLAINTPFPLVLPPTREVHLILSFDFSAGDPFETIRATTDYCRRHKIPFPQVEEAELDLWSKAPASCYILKGETGPVVIHFPLFNIDACGGDIEAWSDTYDTFKLADTYTLDVVVLLLALAKKNVRENKKKILRELMNVAGLYYPKDSARSCCLA

SEQ ID NO: 66 - protein, 119 aa, Sus scrofa
ALFQFRSMIKCAIPGSHPLMDFNNYGCYCGWGGSGTPVDELDRCCETHDNCYRDAKNLSGCYPYTESYSYSCSNTEITCNSKNNACEAFICNCDRNAAICFSKAPYNKEHKNLDTKKYC

SEQ ID NO: 67 - protein, 119 aa, Sus scrofa; identical to SEQ ID NO: 66

SEQ ID NO: 68 - protein, 1463 aa, Cavia porcellus
MGLQPGVLLVGLLLLGQGITQIHTSSGKSTLEGQLWPETKKNFPFSCSPKKLGLNMPSESVHTLTPADIKLIAAIGDMETPPDSGAVNLDTSERTEKEPWRGCMGMMTVLSDIISHFNPSVLLPTCPPWRSAAVRGGVEELRTQAEELVSSLKKNPQLDFQQDWKLINVFFSNASLCYLCPSAHENGPLMSNMDKLAGILHYLHQEVPRAFVNLVDLFEVVAMPRWHQGTMLSRPSPEACGCSGETSKLDTVVMQWSYQETWDSLLASSSFNDQESFAVVFQPFFYEVSSPVEEPPSQDPTTLALSLWNNMMKPVGQKDEPFSTIERRPMKCPSQESPYLFTYRNSNYQSRLLKRQRQHKEREGTEIRCPDKDPSDSTPTSVHRLKPADIKVIGALGDSLTAGNGAGSRPGNILDVLTEYRGLSWSIGADHNISSVTTLPNILREFNPSLKGFSTGTGKANSVGAFFNQAVAGARAGDLIPQARTLVDLMKNHTSINFEEDWKIITVFIGGNDLCDFCSDPVTNSPENFTDNIRQALDILHAEVPRAFVNMVKVLQIVNLRELYKDSRVSCPRLILRNLCRCVLLPDDNSTELESLIDINKKYQERTHQLIESGRYDTREDFTVVLQPFFEKVDIPKTSEGLPDNTSFAPDCFHFSSKTHARAASALWKNMLEPVGQKTTQNNFENSIDIICPNQAFPYLSTYKNGIEGHGTWLTCRERTPSASPPTSVHALRPADVRVVAALGDSLTAGSGIGSKPGDLADVITQYRGLSYSSGGDGSLMNVTTLPNILREFNSNLTGYAVGTGDASNTNAFLNQAVPGAKAEELMSQVKTLVQKMKDDPRINFHEDWKVITVLIGTNDLCNHCTDLDLYSSANFFNHLLNALDILHREVPRALVNLVDFMNPSIMRQVFLGNPDKCPVQQASILCNCVLSLRENSYELARMDALTRAYQSSMRELVESGRYDTREDFSVVLQPFFLNIRLPILEDGRPDTSFFAPDCINPGQKFHSQLSRALWVNMLEPVGSKTDTLDLTADISLPCPTQEEPFLRTPQNSDYTYPTKPAIENWGSDFLCTEWKPSNSVPTSVHKLQPADIKVVAALGDSLTTAVGARASNSSDLLMSWRGLSWSIGGDGALETHTTLPNILKKFNPSIFGFSTGTLEETAGFNVAVEEARARDMPAQARDLVERMKASTEINLEMDWKLITLFIGSNDLCHYCDNPENHSAEEYVQHIRQALDILYEELPRAFINVVDIIMELAGLHQGQGGHCTALLPAQSTCSCLRHFPSSPVIQELKKVTWNLQSDMSRLSYQEKYTQREDFAVVVQPFFQNTLIPLDKLGSTDPTFFSEDCLHFSERGHAEMAIALWNNMLEPVGHKTTFNNFTYNRTKLKCPSTESPYLYTLQNSLSLPVQTEKASGVAPGIVSAAAAGGLLVGLIVGILAVSLWSSFRRRQKKSPPESVPVANF

SEQ ID NO: 69 - protein, 748 aa, Mus musculus; identical to SEQ ID NO: 10

SEQ ID NO: 70 - protein, 165 aa, Homo sapiens
MGPLPVCLPIMLLLLLPSLLLLLLLPGPGSGEASRILRVHRRGILELAGTVGCVGPRTPIAYMKYGCFCGLGGHGQPRDAIDWCCHGHDCCYTRAEEAGCSPKTERYSWQCVNQSVLCGPAENKCQELLCKCDQEIANCLAQTEYNLKYLFYPQFLCEPDSPKCD

SEQ ID NO: 71 - protein, 224 aa, Homo sapiens
MPGGLLLGDVAPNFEANTTVGRIRFHDFLGDSWGILFSHPRDFTPVCTTELGRAAKLAPEFAKRNVKLIALSIDSVEDHLAWSKDINAYNCEEPTEKLPFPIIDDRNRELAILLGMLDPAEKDEKGMPVTARVVFVFGPDKKLKLSILYPATTGRNFDEILRVVISLQLTAEKRVATPVDWKDGDSVMVLPTIPEEEAKKLFPKGVFTKELPSGKKYLRYTPQP

SEQ ID NO: 72 - protein, 752 aa, Mus musculus; identical to SEQ ID NO: 44

SEQ ID NO: 73 - protein, 509 aa, Homo sapiens
MGVQAGLFGMLGFLGVALGGSPALRWYRTSCHLTKAVPGNPLGYLSFLAKDAQGLALIHARWDAHRRLQSCSWEDEPELTAAYGALCAHETAWGSFIHTPGPELQRALATLQSQWEACRALEESPAGARKKRAAGQSGVPGGGHQREKRGWTMPGTLWCGVGDSAGNSSELGVFQGPDLCCREHDRCPQNISPLQYNYGIRNYRFHTISHCDCDTRFQQCLQNQHDSISDIVGVAFFNVLEIPCFVLEEQEACVAWYWWGGCRMYGTVPLARLQPRTFYNASWSSRATSPTPSSRSPAPPKPRQKQHLRKGPPHQKGSKRPSKANTTALQDPMVSPRLDVAPTGLQGPQGGLKPQGARWVCRSFRRHLDQCEHQIGPREIEFQLLNSAQEPLFHCNCTRRLARFLRLHSPPEVTNMLWELLGTTCFKLAPPLDCVEGKNCSRDPRAIRVSARHLRRLQQRRHQLQDKGTDERQPWPSEPLRGPMSFYNQCLQLTQAARRPDRQQKSWSQ

SEQ ID NO: 74 - protein, 1487 aa, Mus musculus; identical to SEQ ID NO: 5

SEQ ID NO: 75 - protein, 441 aa, Homo sapiens; identical to SEQ ID NO: 64

SEQ ID NO: 76 - protein, 1458 aa, Homo sapiens
MGLRPGIFLLELLLLLGQGTPQIHTSPRKSTLEGQLWPETLKNSPFPCNPNKLGVNMPSKSVHSLKPSDIKFVAAIGNLEIPPDPGTGDLEKQDWTERPQQVCMGVMTVLSDIIRYFSPSVPMPVCHTGKRVIPHDGAEDLWIQAQELVRNMKENLQLDFQFDWKLINVFFSNASQCYLCPSAQQNGLAAGGVDELMGVLDYLQQEVPRAFVNLVDLSEVAEVSRQYHGTWLSPAPEPCNCSEETTRLAKVVMQWSYQEAWNSLLASSRYSEQESFTVVFQPFFYETTPSLHSEDPRLQDSTTLAWHLWNRMMEPAGEKDEPLSVKHGRPMKCPSQESPYLFSYRNSNYLTRLQKPQDKLEVREGAEIRCPDKDPSDTVPTSVHRLKPADINVIGALGDSLTAGNGAGSTPGNVLDVLTQYRGLSWSVGGDENIGTVTTLANILREFNPSLKGFSVGTGKETSPNAFLNQAVAGGRAEDLPVQARRLVDLMKNDTRIHFQEDWKIITLFIGGNDLCDFCNDLVHYSPQNFTDNIGKALDILHAEVPRAFVNLVTVLEIVNLRELYQEKKVYCPRMILRSLCPCVLKFDDNSTELATLIEFNKKFQEKTHQLIESGRYDTREDFTVVVQPFFENVDMPKTSEGLPDNSFFAPDCFHFSSKSHSRAASALWNNMLEPVGQKTTRHKFENKINITCPNQVQPFLRTYKNSMQGHGTWLPCRDRAPSALHPTSVHALRPADIQVVAALGDSLTAGNGIGSKPDDLPDVTTQYRGLSYSAGGDGSLENVTTLPNILREFNRNLTGYAVGTGDANDTNAFLNQAVPGAKAEDLMSQVQTLMQKMKDDHRVNFHEDWKVITVLIGGSDLCDYCTDSNLYSAANFVDHLRNALDVLHREVPRVLVNLVDFLNPTIMRQVFLGNPDKCPVQQASVLCNCVLTLRENSQELARLEAFSRAYRSSMRELVGSGRYDTQEDFSVVLQPFFQNIQLPVLADGLPDTSFFAPDCIHPNQKFHSQLARALWTNMLEPLGSKTETLDLRAEMPITCPTQNEPFLRTPRNSNYTYPIKPAIENWGSDFLCTEWKASNSVPTSVHQLRPADIKVVAALGDSLTTAVGARPNNSSDLPTSWRGLSWSIGGDGNLETHTTLPNILKKFNPYLLGFSTSTWEGTAGLNVAAEGARARDMPAQAWDLVERMKNSPDINLEKDWKLVTLFIGVNDLCHYCENPEAHLATEYVQHIQQALDILSEELPRAFVNVVEVMELASLYQGQGGKCAMLAAQNNCTCLRHSQSSLEKQELKKVNWNLQHGISSFSYWHQYTQREDFAVVVQPFFQNTLTPLNERGDTDLTFFSEDCFHFSDRGHAEMAIALWNNMLEPVGRKTTSNNFTHSRAKLKCPSPESPYLYTLRNSRLLPDQAEEAPEVLYWAVPVAAGVGLVVGIIGTVVWRCRRGGRREDPPMSLRTVAL

SEQ ID NO: 77 - protein, 1478 aa, Mus musculus
MELYPGVSPVGLLLLLLLGQGPSQIHGSSGENTLAWQSQQVFWTLKNFPFPCKPKKLELSVLSESVHSLRPSDIKLVAAIGNPEIPLAPGSGTINMEKPQSIKNQPQDVCMGIMTVLSDIIRHFSPSVLMPTCSPGKGTAVHTTAEDLWIQAKELVRRLKDNPQLDFEKDWKLITVFFSNTSQCHLCPSAQQKSHLMRHMEMLWGVLDYLHHEVPRAFVNLVDLSEVLAMDLQHQETGFSPAPEVCKCTETTTLSKAVMQWSYQEAWEDLLASSKFNKHETFAVVFQPFFDEIEPPLKRSSPQDPTTLALRIWNSMMEPVGQKDGLLNTAERKTMKCPSEESPYLFTYKNSNYQARRLKPITKLQMKEGSEFTCPDKNPSNSIPTTVHSLRPADIKIIGALGDSLTAGNGAGASPWNILDVLTEYRGLSWSVGGDETIKTVTTLPNILREFNPSLKGFSVGTGKESTSRASFNQAVAGAKSDGLAGQARKLVDLMKADKTINFQEDWKIITVFIGGNDLCASCSNSTRFSPQNFIDNIKNALDILHAEVPRAFVNMAMVMEITPLRELFNEPTVSCPRNILSRLCPCVLGLGDNSEELSSLVQRNRDYQKKTEELINSGRYDTRDNFTVVVQPLFENVSMPRTPEGVPDKSFFAPDCFHFNAKTHARSAIALWKNMLEPVGHKTRHNNFEIKAPIVCPNQASPFLSTTKNSNLGNGTWMVCEERAPSASPPTSVHTLRPADIQVVAALGDSLTAGNGISSQEGNLTDVSTQYRGLSYSAGGDKTLENVTTLPNILRKFNGNLTGYSVGTGDSSSANAFLNQAVPGAKAENLTSQVRTLVQKMKSDNRVNFNRDWKVITVMIGASDLCDFCTDSNHYSAANFFDHLQNALDILHKEVPRALVNLVDFINPSIIREVFLKNPDKCPVNQSSVLCNCVLTPRKDSYELARLEAFTKSYQSSMLQLVESGRYDTREDFSVVLQPFLLNTKLPVLENGKPDTSFFAPDCIHLNQKFHTQLARALWANMLEPLGKKTDTLDPKGHISLACPTKDQPFLRTFRNSNYKYPTKPAIENWGSDFLCTEKSPSSQVPTSVHELRPADIKVVAAMGDFLTTATGARPSGYKRLATPWRGLSWSIGGDGKLETHTTLPNILKKFNPSITGFSTGTLDNKAGLNVAEEGARAQDMPAQAKTLVKKMKSTPTINLQEDWKLITLLIGNNDLCLYCENPEDNSTKEYVKYIQQALDILYEELPRVFINVVEVMELAGLHHVQGGKCAMPLAVQKNCSCLRHSQNLTAMQELKKLNWNLQSGISELSYWHRYMEREDFAVTVQPFFRNTFIPLNEREGLDLTFFSEDCFYFSDRGHAEMAIALWNNMLEPVGWKTSSNNFIYNRTKLKCPSPERPFLYTLRNSQLLPDKAEEPSNALYWAVPVAAIGGLAVGILGVMLWRTVKPVQQEEEEEDTLPNTSVTQDAVSEKRLKAGN

SEQ ID NO: 78 - protein, 1458 aa, Oryctolagus cuniculus
MALWPSVFLLGLLPLLGRGADQIQTSSGKNTLEGQLWPESLKTFPFPCDPKTLAESVPSESVHSLRPSDIKFVAAIGNVETAPDSGADDLEEQDGTEKRPEQACMGVVTVLSDIIGRFSPSALMPLCPETRLVPRGGAEDLWMQATELVRSMRENPQLDFEHDWKLINVFFSNTSQCFPCPSAQQKGLVLGGMDKLTRTLDYLQQEVPKAFVNLVDLSELAAFSRWRQGAQLSPAAEPCRCLRETSQLTKVLTQWSYLEAWDSLLASSKYNTQESFAVVFQPFFYESSLSALLAEPPLQDPTTLALSLWNRMMEPIGRKEEPFSEKERKPLRCPTQESPYLFTYRNSGQLTRVSQPQGKLEVREGTEIRCPDKDPSDSVPTSVHRLKPADIKVIGAMGDSLTAGNGAGSQPGNILDVLTQYRGLSWSVGGDQNISTVTTLANILREFNPSLQGFSVGTGRETTSQAFFNQAVAGARADGLIPQAQRLVALMKNDTRINFQEDWKIITVFIGGNDLCDFCNDPVRYSPQNFTDNIGTALDILHAEIPRAFVNLVKVLEISKLRELYQETKVSCPRMILRSLCPCVLKFDDNSTEIASLIETIKEYQERTQQLIDSGRYDTRDDFTVVLQPFFEKVNMPKTQDGLPDNSFFAPDCFHFSSKAHAHAASALWNNMLEPVGQKTTHNDFEGAVNITCPNQVWPFLSTYKNSVQGFGTWLPCRDRSPSASPPTSVHALRPADIQVVAALGDSLTAGIGIGSKPNDLSDGTTQYRGLSYSSGGDGSLDNVTTLPNILRQFNSNLMGFAVGTGDASGTNAFFNQAVPGAKARDLMSQVQTLVQRMKDDHRVNFQEDWKVITVQIGASDLCDYCTDSNLYSAANFYDHLRDALDALHREVPRALVNLVDFMNPSVTRQVFLGNPDKCPVQQASALCNCVLSPRENSYELARLEALAQAYQSSLRELVESGRYDTREDFSVVLQPFFHSIQLPVLQDGRLDTSFFAPDCVHPNQKFHSQLSRALWRNMLEPLGGKTDALDLTAAITLTCPTQNEPFLRTFRNSDYTYPSRPAVENWGSDFLCTAWNASRGVPNSVHELQPGDIKVVAALGDSLTLAMGARPSNSSDPPMFWRGLSWSIGGDGALETHTTLPNILKKFNPSILGFSTGTLEGTMGLNVAVQGARAQDMPAQARDLVERMRNSPEIDLEKDWKLVTLFVGGNDLCHFCENPEGSSEGEYVQHIQQALDVLYEELPRTFVNVVEVMELAGLHQDQGGRCATLLAAQSHCTCFKYSQSSVEMQELKKVNWNLQSGLSRLSYSHQYVQREDFAVVVQPFFQNTLVPLNGRGDTDLTFFSDDCFHFSERGHAEMAIALWNNMLEPVGHKTTSNNFTYSRTKLKCPSPDSPYLYTLRNSRLLPDQAEADPTVLYWAVPVAAGAGLLIGILAMVAGRGMRCRPREDPPLSLSTGL

SEQ ID NO: 79 - protein, 1324 aa, Homo sapiens
MLLSPSLLLLLLLGAPRGCAEGVAAALTPERLLEWQDKGIFVIQSESLKKCIQAGKSVLTLENCKQANKHMLWKWVSNHGLFNIGGSGCLGLNFSAPEQPLSLYECDSTLVSLRWRCNRKMITGPLQYSVQVAHDNTVVASRKYIHKWISYGSGGGDICEYLHKDLHTIKGNTHGMPCMFPFQYNHQWHHECTREGREDDLLWCATTSRYERDEKWGFCPDPTSAEVGCDTIWEKDLNSHICYQFNLLSSLSWSEAHSSCQMQGGTLLSITDETEENFIREHMSSKTVEVWMGLNQLDEHAGWQWSDGTPLNYLNWSPEVNFEPFVEDHCGTFSSFMPSAWRSRDCESTLPYICKKYLNHIDHEIVEKDAWKYYATHCEPGWNPYNRNCYKLQKEEKTWHEALRSCQADNSALIDITSLAEVEFLVTLLGDENASETWIGLSSNKIPVSFEWSNDSSVIFTNWHTLEPHIFPNRSQLCVSAEQSEGHWKVKNCEERLFYICKKAGHVLSDAESGCQEGWERHGGFCYKIDTVLRSFDQASSGYYCPPALVTITNRFEQAFITSLISSVVKMKDSYFWIALQDQNDTGEYTWKPVGQKPEPVQYTHWNTHQPRYSGGCVAMRGRHPLGRWEVKHCRHFKAMSLCKQPVENQEKAEYEERWPFHPCYLDWESEPGLASCFKVFHSEKVLMKRTWREAEAFCEEFGAHLASFAHIEEENFVNELLHSKFNWTEERQFWIGFNKRNPLNAGSWEWSDRTPVVSSFLDNTYFGEDARNCAVYKANKTLLPLHCGSKREWICKIPRDVKPKIPFWYQYDVPWLFYQDAEYLFHTFASEWLNFEFVCSWLHSDLLTIHSAHEQEFIHSKIKALSKYGASWWIGLQEERANDEFRWRDGTPVIYQNWDTGRERTVNNQSQRCGFISSITGLWGSEECSVSMPSICKRKKVWLIEKKKDTPKQHGTCPKGWLYFNYKCLLLNIPKDPSSWKNWTHAQHFCAEEGGTLVAIESEVEQAFITMNLFGQTTSVWIGLQNDDYETWLNGKPVVYSNWSPFDIINIPSHNTTEVQKHIPLCALLSSNPNFHFTGKWYFEDCGKEGYGFVCEKMQDTSGHGVNTSDMYPMPNTLEYGNRTYKIINANMTWYAAIKTCLMHKAQLVSITDQYHQSFLTVVLNRLGYAHWIGLFTTDNGLNFDWSDGTKSSFTFWKDEESSLLGDCVFADSNGRWHSTACESFLQGAICHVPPETRQSEHPELCSETSIPWIKFKSNCYSFSTVLDSMSFEAAHEFCKKEGSNLLTIKDEAENAFLLEELFAFGSSVQMVWLNAQFDGNSK

SEQ ID NO: 80 - protein, 189 aa, Homo sapiens
MALLSRPALTLLLLLMAAVVRCQEQAQTTDWRATLKTIRNGVHKIDTYLNAALDLLGGEDGLCQYKCSDGSKPFPRYGYKPSPPNGCGSPLFGVHLNIGIPSLTKCCNQHDRCYETCGKSKNDCDEEFQYCLSKICRDVQKTLGLTQHVQACETTVELLFDSVIHLGCKPYLDSQRAACRCHYEEKTDL

SEQ ID NO: 81 - protein, 1463 aa, Homo sapiens; identical to SEQ ID NO: 8

SEQ ID NO: 82 - protein, 1474 aa, Monodelphis domestica
MRLQPSLLLLALLLLKVTTIQATLGNNSWEEQTWPEGLKNFPFPCRPEEIPFSPPSESVHSLRISDIRVVGAIGNLETTPDAKMVLKRQKWIERNQMQTCMQVMTVLSDFIKKFSPSVLPLLCPSREKVLPRMRNEDLGPQARELVQHMKKNQKLNFRNDWKLINVFFNAQSQCHPCSSSQKEGNMTSSMQELIRLLDYLQKEVPKAFVNLVDISELGNSIQSNNQENGPRDINEVCECPQEPSRLTTAVQRWYYQNSWEKLLTSGRYDTKDTFTVIYQSFLHEMEPSVFPIKQTSGSSLKKLSTALAVSLWNGMIDPTGKKEEFFTTGQRIPVKCPTQKHPYLFTYRNNNKLSSTPEIKRISETREGTEIRCPDMDPSNAVPTSVHHLRPADIKVIGALGDSLTAGNGAGSTPGNILDVLTQYRGLSWSIGGNENISTVTTLANILREFNPSLIGFSTGTGNQNSAAAFLNQAVAGATSETLPSQARRLVDLMKENKRINFQDDWKIVTLFIGGNDLCDSCSDPPRYSSQNFTAHIGKALDILHAEVPRVFVNLVTVLSIVSLRELYQEESINCPRVILRSLCPCVLKFKDNSTELTTLIELNKQYQEETHRLVDSGRYDTRDDFTVVLQPFLEQVPMPKTPEGLPDSSFFAPDCFHFHSKAHARVARSLWNNMLEPVGEKKKEENLENIVDLICPSESQPYLRTYKNSNYTYPTATPTSSPKPDYGSQLWCEDRAPSASFPTSVHALKPADIQVVAAVGDSLTAGNGIGSKPDDLPDVITQYRGLSYSAGGDASLESVTTLPNILREFNMNLTGFAVGVGSADDANAFLNQAVPGAKAEGLKKQVQTLVQKMKSDPRINFQRDWKVITLLIGTTDLCDYCTDSNLYSATNFSAYLRDALDFLHREVPRALVNLVDFMNPIIFRQVFLGNQDKCPMTQACSLCNCLLTVREDSPELARMKEVVKVYQTKIRELVESGRYDTREDFTIVLQPFLEEVKLAFQDGIPDVSFFAPDCIHPNQKFHSQLSRALWNNMLQPLGKKMDFLDLTADTTLSCPSLEEPFLRTYRNSNYTYPANPAIENWGSDFLCPEQGSSNSAPSSVHQLRPADIKVVAALGDSLTTAVGAGAKNNSNWSTAWRGLSWSIGGDGTLETHTTLPNILKKFNPHLHGFSTGTQEEAAGLNVAVEGAIAQDMPSQARILVDRMKNSSEINLDQDWKLITIFVGSNDLCQYCENPEAHSVKNYVQSLQQALDIFYKELPRAFINVVEIMELVGLRQIQGEKCAVTTQSICPCFGRSLDNSPELQEMKNINRHFQSGSSLITYHHQYMEREDFAVVVQPFFQSTVVPLDDKGKPDLSFFSVDCFHFSERGHAEMAIALWNNMLEPVGQKQTYNNFTHSRTKVKCPTSENPYFFTMRNSGLLRKEASHKTPSVPFWAVLVAAAASFIVGVVLVMLWRTKKCSRREERPISLVATVF

SEQ ID NO: 83 - protein, 493 aa, Homo sapiens
MIAFLLTSVLMIPHAGGHPLDTPHLPQELPPGLPNNINITFFSGMFKNVESVAEIFDCLGAHFTWLQAVFTNFPVLIQFVNGMKCVAGLCPRDFEDYGCTCRFEMEGLPVDESDSCCFQHRRCCEEAAEMDCLQDPAKLSTEVDCVGKKIICESKDNCEHLLCTCDKAAIECLARSSLNSSLNLLDTSFCLAQTPETTIKEDLTTLLPRVVPVEPTDTSLTALSGEVAAETEADRLITLSKKKAGHDQEGVGAARATSPPGSAEIVATRVTAKIVTLVPAGIKSLGLAVSSVENDPEETTEKACDRFTFLHLGSGDNMQVMPQLGEMLFCLTSRCPEEFESYGCYCGQEGRGEPRDDLDRCCLSHHCCLEQVRRLGCLLERLPWSPVVCVDHTPKCGGQSLCEKLLCACDQTAAECMTSASFNQSLKSPSRLGCPGQPAACEDSLHPVPAAPTLGSSSEEDSEEDPPQEDLGRAKRFLRKSLGPLGIGPLHGR

SEQ ID NO: 84 - protein, 504 aa, Homo sapiens
MFPREKTWNISFAGCGFLGVYYVGVASCLREHAPFLVANATHIYGASAGALTATALVTGVCLGEAGAKFIEVSKEARKRFLGPLHPSFNLVKIIRSFLLKVLPADSHEHASGRLGISLTRVSDGENVIISHFNSKDELIQANVCSGFIPVYCGLIPPSLQGVRYVDGGISDNLPLYELKNTITVSPFSGESDICPQDSSTNIHELRVTNTSIQFNLRNLYRLSKALFPPEPLVLREMCKQGYRDGLRFLQRNGLLNRPNPLLALPPARPHGPEDKDQAVESAQAEDYSQLPGEDHILEHLPARLNEALLEACVEPTDLLTTLSNMLPVRLATAMMVPYTLPLESALSFTIRLLEWLPDVPEDIRWMKEQTGSICQYLVMRAKRKLGRHLPSRLPEQVELRRVQSLPSVPLSCAAYREALPGWMRNNLSLGDALAKWEECQRQLLLGLFCTNVAFPPEALRMRAPADPAPAPADPASPQHQLAGPAPLLSTPAPEARPVIGALGL

SEQ ID NO: 85 - protein, 151 aa, Rattus norvegicus; identical to SEQ ID NO: 49

SEQ ID NO: 86 - protein, 124 aa, Homo sapiens [sequence omitted]

SEQ ID NO: 87 - protein, 1487 aa, Mus musculus; identical to SEQ ID NO: 5

SEQ ID NO: 88 - protein, 189 aa, Homo sapiens; identical to SEQ ID NO: 80

SEQ ID NO: 89 - protein, 195 aa, Homo sapiens
MKLASGFLVLWLSLGGGLAQSDTSPDTEESYSDWGLRHLRGSFESVNSYFDSFLELLGGKNGVCQYRCRYGKAPMPRPGYKPQEPNGCGSYFLGLKVPESMDLGIPAMTKCCNQLDVCYDTCGANKYRCDAKFRWCLHSICSDLKRSLGFVSKVEAACDSLVDTVFNTVWTLGCRPFMNSQRAACICAEEEKEEL

SEQ ID NO: 90 - protein, 195 aa, Mus musculus
MKLLCGFFLLWLGLVGNLAQSDPSPKEEESYSDWGLRQLRGSFESVNSYVDSFMELLGGKNGVCQYRCRYGKAPMPRPGYKAQEPNGCSSYFLGIKVPGSMDLGIPAMTKCCNQLDVCYDTCGANKYRCDAKFRWCLHSICSDLKRSLGFVSNVEAACDSLADTVFNTVWTLGCRPFMNSQRAACICAEEEKEEL

SEQ ID NO: 91 - protein, 192 aa, Mus musculus
MVTPRPAPARSPALLLLLLLATARGQEQDQTTDWRATLKTIRNGIHKIDTYLNAALDLLGGEDGLCQYKCSDGSKPVPRYGYKPSPPNGCGSPLFGVHLNIGIPSLTKCCNQHDRCYETCGKSKNDCDEEFQYCLSKICRDVQKTLGLSQNVQACETTVELLFDSVIHLGCKPYLDSQRAACWCRYEEKTDL

SEQ ID NO: 92 - protein, 144 aa, Mus musculus
MRLALLCGLLLAGITATQGGLLNLNKMVTHMTGKKAFFSYWPYGCHCGLGGKGQPKDATDWCCQKHDCCYAHLKIDGCKSLTDNYKYSISQGTIQCSDNGSWCERQLCACDKEVALCLKQNLDSYNKRLRYYWRPRCKGKTPAC

SEQ ID NO: 93 - protein, 855 aa, Mus musculus
MPWTLQPKWLAGKGLPLLGAILLRKTEKSEPQWKHRRQETHPYYDLQVKVLRARNIQHTDKLSKADCYVRLWLPTASVSPSQTRTVVNSSDPEWNETFPYQIHGAVKNVLELALYDEDVLDSDNVFSILFDTSTLQLGQPCTKNFTRQQDPKELEVEFTLEKSQTPASEVVTNGVLVAHPCLRIQGTVTGDKTASLGELGSRQIQLAVPGAYEKPQPLQPTSEPGLPVNFTFHVNPVLSPKLHIKLQEQLQVFHSGPSDELEAQTSKMDKASILLSSLPLNEELTKLVDLEEGQQVSLRMKADMSSSGDLDLRLGFDLCDGEQEFLDKRKQVASKALQRVMGLSEALHCDQVPVVAVLGSGGGTRAMTSLYGSLAGLQELGLLDAVTYLSGVSGSSWCISTLYRDPSWSQKALQGPIKYASERVCSSKIGMLSPKQFEYYSREKRAWESRGHSMSFTDLWGLIIEYFLNQEENPAKLSDQQETVSQGQNPYPIYASINVHKNISGDDFAEWCEFTPYEVGFPKYGAYVPTELFGSEFFMGRLLHFWPEPRICYLQGMWGSAFAASLYEIFLKLGGLSLSFLDWHRGSVSVTDDWPKLRKQDPTRLPTRLFTPMSSFSQAVLDIFTSRITCAQTFNFTRGLCMYKDYTARKDFVVSEDAWHSHNYGYPDACPNQLTPMKDFLSLVDGGFAINSPFPLVLQPQRAVDLIVSFDYSLEGPFEVLQVTEKYCRDRGIPFPRIEVDPKDSEDPRECYLFAEAEDPCSPIVLHFPLVNRTFRTHLAPGVERQTAEEKAFGDFIINGPDTAYGMMDFTYEPKEFDRLVTLSRYNVLNNKETIRHALQLALDRRRQAGGRVGG

SEQ ID NO: 94 - protein, 440 aa, Mus musculus
MVPLKLQALFCLLCCLPWVHPFHWQDTSSFDFRPSVMFHKLQSVMSAAGSGHSKIPKGNGSYPVGCTDLMFGYGNESVFVRLYYPAQDQGRLDTVWIPNKEYFLGLSIFLGTPSIVGNILHLLYGSLTTPASWNSPLRTGEKYPLIVFSHGLGAFRTIYSAIGIGLASNGFIVATVEHRDRSASATYFFEDQVAAKVENRSWLYLRKVKQEESESVRKEQVQQRAIECSRALSAILDIEHGDPKENVLGSAFDMKQLKDAIDETKIALMGHSFGGATVLQALSEDQRFRCGVALDPWMYPVNEELYSRTLQPLLFINSAKFQTPKDIAKMKKFYQPDKERKMITIKGSVHQNFDDFTFVTGKIIGNKLTLKGEIDSRVAIDLTNKASMAFLQKHLGLQKDFDQWDPLVEGDDENLIPGSPFDAVTQVPAQQHSPGSQTQN

SEQ ID NO: 95 - protein, 150 aa, Homo sapiens
MLIATSFFLFFSSVVAAPTHSSFWQFQRRVKHITGRSAFFSYYGYGCYCGLGDKGIPVDDTDSPSSPSPYEKLKEFSCQPVLNSYQFHIVNGAVVCGCTLGPGASCHCRLKACECDKQSVHCFKESLPTYEKNFKQFSSQPRCGRHKPWC

SEQ ID NO: 96 - protein, 346 aa, Homo sapiens
MAMVSEFLKQAWFIENEEQEYVQTVKSSKGGPGSAVSPYPTFNPSSDVAALHKAIMVKGVDEATIIDILTKRNNAQRQQIKAAYLQETGKPLDETLKKALTGHLEEVVLALLKTPAQFDADELRAAMKGLGTDEDTLIEILASRTNKEIRDINRVYREELKRDLAKDITSDTSGDFRNALLSLAKGDRSEDFGVNEDLADSDARALYEAGERRKGTDVNVFNTILTTRSYPQLRRVFQKYTKYSKHDMNKVLDLELKGDIEKCLTAIVKCATSKPAFFAEKLHQAMKGVGTRHKALIRIMVSRSEIDMNDIKAFYQKMYGISLCQAILDETKGDYEKILVALCGGN

SEQ ID NO: 97 - protein, 145 aa, Homo sapiens
MELALLCGLVVMAGVIPIQGGILNLNKMVKQVTGKMPILSYWPYGCHCGLGGRGQPKDATDWCCQTHDCCYDHLKTQGCSIYKDYYRYNFSQGNIHCSDKGSWCEQQLCACDKEVAFCLKRNLDTYQKRLRFYWRPHCRGQTPGC

SEQ ID NO: 98 - protein, 168 aa, Homo sapiens
MKKFFTVAILAGSVLSTAHGSLLNLKAMVEAVTGRSAILSFVGYGCYCGLGGRGQPKDEVDWCCHAHDCCYQELFDQGCHPYVDHYDHTIENNTEIVCSDLNKTECDKQTCMCDKNMVLCLMNQTYREEYRGFLNVYCQGPTPNCSIYEPPPEEVTCSHQSPAPPAPP

SEQ ID NO: 99 - protein, 124 aa, Sus scrofa
ALWQFRSMIKCTIPGSDPLLDFNNYGCYCGLGGSGTPVDELDRCCETHDNCYRDAKNLDSCKFLVDNPYTNSYSYSCSNTEITCNSKNNACEAFICNCDRNAAICFSKAPYNKEHKNLDTKKYC

SEQ ID NO: 100 - protein, 791 aa, Mus musculus
MALQTCPVYMQAKVPETCLLTVRVLRASGLPSKDLVTSSDCYVTLNLPTASSHTLQTRTVKNSRNPVWNQNFHFRIHRQLKNVMELKVFDHDLVTRDDPVLSVLFDVGTLQIGTQRQSFSLGTQEKGCLEVEFRLQTLTDCEEQLISNGIVVARELSCLHVELKRTGDPKRSERKVQLVVAGACEGPQDASAGTGSFHFHYPACWEQELNVHLQDDPHEQLKVPLRTLPSSQLVRLVFPTSQEPLMRLELKKEEGPKELAVRLGCGPCPEEQAFLSKRKQVVAAALKKALQLDQDLHEDEIPVIAVMATGGGIRAMTSLYGQLAGLQELGLLDCISYITGASGSTWALANLYEDPEWSQKDLAGPTEVLKTQVTKSKLGALAPSQLWRYRQELAERARLGHPTCFTNLWALINEALLHDKPHEHKLSDQREALSRGQNPLPIYCALNSKEQGLSTFDFGEWCEFSPYEVGFPKYGAFISSELFGSEFFMGRLVKQLPESRICFLEGIWSNLFAASLQDSLYWSSEPSQFWDRWAQDQANLDKEQVPHLKIAEPPTMAGRIAELFTDLLTKRPLAHATHNFTRGLHFHKDYFQNSHFSAWKASKLDRLPNQLTPTEPHLCLLDVGYLINTSCPPLLQPTRDVDLILSLDYNLYGAFQQLQLLSRFCQEQGIPFPSISPSPEEQRQPQECHLFCDPAQPEAPAVLHFPLVNDSFQDYSAPGVPRTSEEKAAGEVNLSSSDSPYHYTKVTYSQEDVDKLLRLTHYNICNNQDRLREAMHQAVQRRRKRKQFRPE

SEQ ID NO: 101 - protein, 224 aa, Rattus norvegicus
MPGGLLLGDEAPNFEANTTIGHIRFHDFLGDSWGILFSHPRDFTPVCTTELGRAAKLAPEFAKRNVKLIALSIDSVEDHFAWSKDINAYNGAAPTEKLPFPIIDDKDRDLAILLGMLDPAEKDEKGMPVTARVVFIFGPDKKLKLSILYPATTGRNFDEILRVVDSLQLTASNPVATPVDWKKGESVMVLPTLPEEEAKQLFPKGVFTKELPSGKKYLRYTPQP

SEQ ID NO: 102 - protein, 224 aa, Bos taurus
MPGGLLLGDEAPNFEANTTIGRIRFHDYLGDSWGILFSHPRDFTPVCTTELGRAAKLAPEFAKRNVKMIALSIDSVEDHLAWSKDINAYNGEEPTEKLPFPIIDDKNRDLAIQLGMLDPAEKDEKGMPVTARVVFIFGPDKKLKLSILYPATTGRNFDEILRVIISLQLTAEKRVATPVDWKNGDSVMVLPTIPEEEAKKLFPKGVFTKELPSGKKYLRYTPQP

SEQ ID NO: 103 - protein, 1463 aa, Bos taurus; identical to SEQ ID NO: 11

SEQ ID NO: 104 - protein, 855 aa, Mus musculus
MPWTLQPKWLAGKGLPLLGAILLRKTEKSEPQWKHRRQETHPYYDLQVKVLGARNIQHTDKLSKADCYVRLWLPTASVSPSQTRTVVNSSDPEWNETFHYQIHGAVKNVLELALYDEDVLDSDNVFSILFDMSTLQLGQPCTKNFTRQQDPKELEVEFTLEKSQTPASEVVTNGVLVAHPCLRIQGTVTGDKTASLGELGSRQIQLAVPGAYEKPQPLQPTSEPGLPVNFTFHMNPVLSPKLHIKLQEQLQVFHSGPSDELEAQTSKMDKASILLSSLPLNEELTKLVDLEEGQQVTLRMKADMSSSGDLDLRLGFDLCDGEQEFLDKRKQVASKALQRAMGLSEALHCDQVPVVAVLGSGGGTRAMTSLYGSLAGLQELGPLDAVTYLSGVSGSSWCISTLYRDPSWSQKALQGPIKYASERVCSSKIGMLSPKQFEYYSREKRAWESRGHSMSFTDLWGLIIEYFLNQEENPAKLSDQQETVSQGQNPYPIYASINVHKNISGDDFAEWCEFTPYEVGFPKYGAYVPTELFGSEFFMGRLLHFWPEPRICYLQGMRGSAFAASLYGIFLKLGGLSLSFLDWHRGSVSVTDDWPKLRKQDPTRLPTRLFTPMSSFSQAVLDIFTSRITCAQTFNFTRGLCMYKDYTARKDFVVSEDAWHSHNYGYPDACPNQLTPMKDFLSLVDGGFAINSPFPLVLQPQRAVDLIVSFDYSLEGPFEVLQVTEKYCRDRGIPFPRIEVDPKDSEDPRECYLFTEAEDPCSPIVLHFPLVNRTFRTHLAPGVERQTAEEKAFEDFIINGPDTAYGMMDFTYEPKEFDRLVTLSRYNVLNNKETIRHALQLALDRRRQAGGRVGG

SEQ ID NO: 105 - protein, 782 aa, Mus musculus
MQAKVPETCLLTVRVLRASGLPSKDLVTSSDCYVTLNLPTASSHTLQTRTVKNSRNPVWNQNFHFRIHRQLKNVMELKVFDHDLVTRDDPVLSVLFDVGTLQIGTQRQSFSLGTQEKGCLEVEFRLQTLTDCEEQLISNGIVVARELSCLHVELKRTGDPKRSERKVQLVVAGACEGPQDASAGTGSFHFHYPACWEQELNVHLQDDPHEQLKVPLRTLPSSQLVRLVFPTSQEPLMRLELKKEEGPKELAVRLGCGPCPEEQAFLSKRKQVVAAALKKALQLDQDLHEDEIPVIAVMATGGGIRAMTSLYGQLAGLQELGLLDCISYITGASGSTWALANLYEDPEWSQKDLAGPTEVLKTQVTKSKLGALAPSQLWRYRQELAERARLGHPTCFTNLWALINEALLHDKPHEHKLSDQREALSRGQNPLPIYCALNSKEQGLSTFDFGEWCEFSPYEVGFPKYGAFISSELFGSEFFMGRLVKQLPESRICFLEGIWSNLFAASLQDSLYWSSEPSQFWDRWAQDQANLDKEQVPHLKIAEPPTMAGRIAELFTDLLTKRPLAHATHNFTRGLHFHKDYFQNSHFSAWKASKLDRLPNQLTPTEPHLCLLDVGYLINTSCPPLLQPTRDVDLILSLDYNLYGAFQQLQLLSRFCQEQGIPFPSISPSPEEQRQPQECHLFCDPAQPEAPAVLHFPLVNDSFQDYSAPGVPRTSEEKAAGEVNLSSSDSPYHYTKVTYSQEDVDKLLRLTHYNICNNQDRLREAMHQAVQRRRKRKQFRPE

SEQ ID NO: 106 - protein, 887 aa, Homo sapiens [sequence omitted]

SEQ ID NO: 107 - protein, 752 aa, Rattus norvegicus
MSFIDPYQHIIVEHQYSHKFTVVVLRATKVTKGTFGDMLDTPDPYVELFISTTPDSRKRTRHFNNDINPVWNETFEFILDPNQENVLEITLMDANYVMDETLGTATFPVSSMKVGEKKEVPFIFNQVTEMILEMSLEVSSCPDLRFSMALCDQEKTFRQQRKENIKENMKKLLGPKKSEGLYSTRDVPVVAILGSGGGFRAMVGFSGVMKALYESGILDCATYVAGLSGSTWYMSTLYSHPDFPEKGPEEINEELMKNVSHNPLLLLTPQKVKRYVESLWKKKSSGLPVTFTDIFGMLIGETLIQNRIVPTLSSLKEKVSAARCPLPLFTCLHVKPDVSELMFADWVEFSPYEIGMAKYGTFMTPDLFGSKFFMGTVVKKYEENPLHFLMGVWGSAFSILFNRVLGVSGLQNKGSTMEEELENITAKHIVSNDSSDSDDEAQGPKGTENEDAEREYQNDNQASWVHRMLMALVSDSALFNTREGRAGKVHNFMLGLNLNTSYPLSPLRDFSPQDSFDDDELDAAVADPDEFERIYEPLDVKSKKIHVVDSGLTFNLPYPLILRPQRGVDLIISFDFSARPSDTSPPFKELLLAEKWAKMNKLPFPKIDPYVFDREGLKECYVFKPKNPDVEKDCTTIIHFVLANINFRKYKAPGVLRETKEEKEIADFDIFDDPESPFSTFNFQYPNQAFKRLHDLMYFNTLNNIDVIKDAIVESIEYRRQNPSRCSVSLSNVEARKFFNKEFLSKPTAESI

SEQ ID NO: 108 - protein, 776 aa, Mus musculus
MSINLTLDIYIYFLNNARSLCGKQRSKQLHFVCSKQYWRMNHVNVHREFHTSKKSCKWNRSEAHCSKHWHSPSNHGLHFGIVRLSTSAPKGLTKVSIHMSRIKSTLNSVSKAIFGSQNEMVTRLAQFKPSSRILRKVSDKGWLKQKNVKQAVESLKNYSDKSAGKNSLAEQKSYFADKEEDSGKHSLFHYTYGITTRFGESFSVLANHINSYFKSKGKMSQTKEDKQLQDKPDLEERKSSSPGPDTVADRPDSESPLEVKDKLSSPTQMPEAHPVSAKQSIANFLSRPTEGVQALVGGYIGGLVPKLKSDPKSPPEEQEVSAKTEQAVNKDKKAEEKKRVLLQQEKIIARVSIDNRTRALVQALRRTADPKLCITRVEELTFHLLEFPEGKGVAIKEKIIPYLLRLRQVKDETLQAAVREILALIGYVDPVKGRGIRILTIDGGGTRGVVALQTLRKLVELTQKPIHQLFDYICGVSTGAILAFMLGLFHMPLDECEELYRKLGSDVFTQNVIVGTVKMSWSHAFYDSNTWEKILKDRIGSALMIETARNPACPKVAAISTIVNRGQTPKAFVFRNYGHFPGTNSHYLGGCQYKMWQAIRASSAAPGYFAEYALGSDLHQDGGLLLNNPSALALHECKCIWPDTPLECIVSLGTGRYESDVRNTSTYTSLKTKLSNVISSATDTEEVHIMLDGLLPSDTYFRFNPVICENIPLDESRDEKLDQLQLEGMKYIERNDQKMKKVAKILSQEKTTLQKINDWIKLKSDMYEGLPFFSKL

SEQ ID NO: 109 - protein, 224 aa, Mus musculus
MPGGLLLGDEAPNFEANTTIGRIRFHDFLGDSWGILFSHPRDFTPVCTTELGRAAKLAPEFAKRNVKLIALSIDSVEDHLAWSKDINAYNGETPTEKLPFPIIDDKGRDLAILLGMLDPVEKDDNNMPVTARVVFIFGPDKKLKLSILYPATTGRNFDEILRVVDSLQLTGTKPVATPVDWKKGESVMVVPTLSEEEAKQCFPKGVFTKELPSGKKYLRYTPQP

SEQ ID NO: 110 - protein, 782 aa, Homo sapiens
MSINLTVDIYIYLLSNARSVCGKQRSKQLYFLFSPKHYWRISHISLQRGFHTNIIRCKWTKSEAHSCSKHCYSPSNHGLHIGILKLSTSAPKGLTKVNICMSRIKSTLNSVSKAVFGNQNEMISRLAQFKPSSQILRKVSDSGWLKQKNIKQAIKSLKKYSDKSAEKSPFPEEKSHIIDKEEDIGKRSLFHYTSSITTKFGDSFYFLSNHINSYFKRKEKMSQQKENEHFRDKSELEDKKVEEGKLRSPDPGILAYKPGSESVHTVDKPTSPSAIPDVLQVSTKQSIANFLSRPTEGVQALVGGYIGGLVPKLKYDSKSQSEEQEEPAKTDQAVSKDRNAEEKKRLSLQREKIIARVSIDNRTRALVQALRRTTDPKLCITRVEELTFHLLEFPEGKGVAVKERIIPYLLRLRQIKDETLQAAVREILALIGYVDPVKGRGIRILSIDGGGTRGVVALQTLRKLVELTQKPVHQLFDYICGVSTGAILAFMLGLFHMPLDECEELYRKLGSDVFSQNVIVGTVKMSWSHAFYDSQTWENILKDRMGSALMIETARNPTCPKVAAVSTIVNRGITPKAFVFRNYGHFPGINSHYLGGCQYKMWQAIRASSAAPGYFAEYALGNDLHQDGGLLLNNPSALAMHECKCLWPDVPLECIVSLGTGRYESDVRNTVTYTSLKTKLSNVINSATDTEEVHIMLDGLLPPDTYFRFNPVMCENIPLDESRNEKLDQLQLEGLKYIERNEQKMKKVAKILSQEKTTLQKINDWIKLKTDMYEGLPFFSKL

SEQ ID NO: 111 - protein, 412 aa, Homo sapiens; identical to SEQ ID NO: 1

SEQ ID NO: 112 - protein, 168 aa, Mus musculus
MKKFFAIAVLAGSVVTTAHSSLLNLKSMVEAITHRNSILSFVGYGCYCGLGGRGHPMDEVDWCCHAHDCCYEKLFEQGCRPYVDHYDHRIENGTMIVCTELNETECDKQTCECDKSLTLCLKDHPYRNKYRGYFNVYCQGPTPNCSIYDPYPEEVTCGHGLPATPVST

SEQ ID NO: 113 - protein, 142 aa, Mus musculus
MKPPIALACLCLLVPLAGGNLVQFGVMIERMTGKPALQYNDYGCYCGVGGSHWPVDETDWCCHAHDCCYGRLEKLGCDPKLEKYLFSITRDNIFCAGRTACQRHTCECDKRAALCFRHNLNTYNRKYAHYPNKLCTGPTPPC

SEQ ID NO: 114 - protein, 142 aa, Homo sapiens
MKSPHVLVFLCLLVALVTGNLVQFGVMIEKMTGKSALQYNDYGCYCGIGGSHWPVDQTDWCCHAHDCCYGRLEKLGCEPKLEKYLFSVSERGIFCAGRTTCQRLTCECDKRAALCFRRNLGTYNRKYAHYPNKLCTGPTPPC

SEQ ID NO: 115 - protein, 230 aa, Oryctolagus cuniculus
MCGNNMSAPMPAVVPAARKATAAVIFLHGLGDTGHGWAEAFAGIKSPHIKYICPHAPVMPVTLNMNMAMPSWFDIVGLSPDSQEDESGIKQAAETVKALIDQEVKNGIPSNRIILGGFSQGGALSLYTALTTQQKLAGVTALSCWLPLRASFSQGPINSANRDISVLQCHGDCDPLVPLMFGSLTVERLKALINPANVTFKIYEGMMHSSCQQEMMDVKHFIDKLLPPID

SEQ ID NO: 116 - protein, 412 aa, Mus musculus
MDRHLCTCRETQLRSGLLLPLFLLMMLADLTLPAQRHPPVVLVPGDLGNQLEAKLDKPKVVHYLCSKKTDSYFTLWLNLELLLPVIIDCWIDNIRLVYNRTSRATQFPDGVDVRVPGFGETFSMEFLDPSKRNVGSYFYTMVESLVGWGYTRGEDVRGAPYDWRRAPNENGPYFLALREMIEEMYQMYGGPVVLVAHSMGNVYMLYFLQRQPQVWKDKYIHAFVSLGAPWGGVAKTLRVLASGDNNRIPVIGPLKIREQQRSAVSTSWLLPYNHTWSHEKVFVYTPTTNYTLRDYHRFFRDIGFEDGWFMRQDTEGLVEAMTPPGVELHCLYGTGVPTPNSFYYESFPDRDPKICFGDGDGTVNLESVLQCQAWQSRQEHRVSLQELPGSEHIEMLANATTLAYLKRVLLEP

SEQ ID NO: 117 - protein, 1458 aa, Oryctolagus cuniculus; identical to SEQ ID NO: 13

SEQ ID NO: 118 - protein, 666 aa, Oryctolagus cuniculus
  misc_feature (278)..(278): Xaa can be any naturally occurring amino acid
MPPSCRPSTRAPSRSCTLRSCSTCPTSSATTPAGRWRTWPWRLGIRECFHHSRIISCANSTENEEGCTPLHLACRKGDGEILLELVQYCHAQMDVTDNKGETAFHYAVQGDNSQVLQLLGKNASTGVNQVNSQGLTPLHLACQMGKQEMVRVLLLCNARCNILGPEGYPIHTAMKFSQRGCAEMIISMDSNQIHSKDPRYGASPLHWAKNAEMARLLLKRGCDVNSTSSSGYTALHVAVMRNRFECVMVLLTYGANADARGEHGNTPLHLAVSKDNVXMVKALIVFGAEVDTPNDFGETPAFIASKISKQLQDVMHISRARKPAFILSSLRDEKRTHDHLLCLDGGGVKGLVIIQLLIAIEKASGVATKDLFDWVAGTSTGGILALAILHSKSMAYMRGVYFRMKDEVFRGSRPYESGPLEEFLKREFGEHTKMTDVKKPKVMLTGTLSDRQPAELHLFRNYDAPESVREPRFSPNINLKPLTQPSDQLVWRAARSSGAAPTYFRPNGRFLDGGLLANNPTLDAMTEIHEYNQDLIRKGQSERVKKLSIVVSLGTGRSPQVPVTCVDVFRPSNPWELAKTVFGAKELGKMVVDCCTDPDGRAVDRARAWCEMVGIQYFRLNPQLGADIMLDEVSDAVLVNALWETEVYIYEHREQFQKLIQLLLSP

SEQ ID NO: 119 - protein, 806 aa, Homo sapiens
MQFFGRLVNTFSGVTNLFSNPFRVKEVAVADYTSSDRVREEGQLILFQNTPNRTWDCVLVNPRNSQSGFRLFQLELEADALVNFHQYSSQLLPFYESSPQVLHTEVLQHLTDLIRNHPSWSVAHLAVELGIRECFHHSRIISCANCAENEEGCTPLHLACRKGDGEILVELVQYCHTQMDVTDYKGETVFHYAVQGDNSQVLQLLGRNAVAGLNQVNNQGLTPLHLACQLGKQEMVRVLLLCNARCNIMGPNGYPIHSAMKFSQKGCAEMIISMDSSQIHSKDPRYGASPLHWAKNAEMARMLLKRGCNVNSTSSAGNTALHVAVMRNRFDCAIVLLTHGANADARGEHGNTPLHLAMSKDNVEMIKALIVFGAEVDTPNDFGETPTFLASKIGRLVTRKAILTLLRTVGAEYCFPPIHGVPAEQGSAAPHHPFSLERAQPPPISLNNLELQDLMHISRARKPAFILGSMRDEKRTHDHLLCLDGGGVKGLIIIQLLIAIEKASGVATKDLFDWVAGTSTGGILALAILHSKSMAYMRGMYFRMKDEVFRGSRPYESGPLEEFLKREFGEHTKMTDVRKPKVMLTGTLSDRQPAELHLFRNYDAPETVREPRFNQNVNLRPPAQPSDQLVWRAARSSGAAPTYFRPNGRFLDGGLLANNPTLDAMTEIHEYNQDLIRKGQANKVKKLSIVVSLGTGRSPQVPVTCVDVFRPSNPWELAKTVFGAKELGKMVVDCCTDPDGRAVDRARAWCEMVGIQYFRLNPQLGTDIMLDEVSDTVLVNALWETEVYIYEHREEFQKLIHLLLSP

SEQ ID NO: 120 - protein, 346 aa, Bos taurus
MAMVSEFLKQAWFIENEEQEYIKTVKGSKGGPGSAVSPYPTFNPSSDVEALHKAITVKGVDEATIIEILTKRNNAQRQQIKAAYLQEKGKPLDEVLKKALLGHLEEVVLALLKTPAQFDAEELRAAMKGLGTDEDTLNEILASRTNREIREINRVYREELKRDLAKDIASDTSGDYEKALLSLAKGDRSEELAVNDDLADSDARALYEAGERRKGTDVNVFITILTTRSYPHLRRVFQKYSKYSKHDMNKVLDLELKGDIEKCLTVIVKCATSQPMFFAEKLHQAMKGIGTRHKTLIRIMVSRSEIDMNDIKACYQKLYGISLCQAILDETKGDYEKILVALCGRD

SEQ ID NO: 121 - protein, 346 aa, Sus scrofa
MAMVSEFLKQAWFIDNEEQEYIKTVKGSKGGPGSAVSPYPTFNPSSDVEASHKAITVKGVDEATIIEIHTKRTNAQRQQIKAAYLQEKGKPLDEALKKALTGHLEEVALALLKTPAQFDADELRAAMKGLGTDEDTLNEILASRTNREIREINRVYKEELKRDLAKDITSDTSGDYQKALLSLAKGDRSEDLAINDDLADTDARALYEAGERRKGTDLNVFITILTTRSYLHLRRVFQKYSKYSKHDMNKVLDLELKGDIENCLTVVVKCATSKPMFFAEKLHQAMKGNGTRHKTLIRIMVSRSEIDMNDIKACYQKLYGISLCQAILDETKGDYEKILVALCGGD

SEQ ID NO: 122 - protein, 346 aa, Oryctolagus cuniculus
MAMVSEFLKQAWFIDNEEQDYINTVKTYKGGPGSAVSPYPAFNPSSDVAALHQAIMVKGVDEATIIDILTKRNNAQRQQIKAAYLQEKGKPLDEVLKKALTGHLEEVVLALLKTPAQFDADELRAAMKGLGTDEDTLIEILASRNNKEIREINRVYREELKRDLAKDIASDTSGDFQKALLSLAKGDRSEDFGVNEDLADTDARALYEAGERRKGADVNVFTTILTTRSYLHLRRVFQKYSKYSQHDMNKVLDLELKGDIEKCLTAIVQCATCKPAYFAEKLYQAMKGAGTRHKALIRIMVSRSEVDMNDIKAFYQKKYGVSLCQAILDETKGDYEKILVALCGGN

SEQ ID NO: 123 - protein, 346 aa, Rattus norvegicus
MAMVSEFLKQACYIEKQEQEYVQAVKSYKGGPGSAVSPYPSFNPSSDVAALHKAIMVKGVDEATIIDILTKRTNAQRQQIKAAYLQETGKPLDETLKKALTGHLEEVVLAMLKTPAQFDADELRAAMKGLGTDEDTLIEILTTRSNQQIREITRVYREELKRDLAKDITSDTSGDFRNALLALAKGDRCEDMSVNQDLADTDARALYEAGERRKGTDVNVFNTILTTRSYPHLRKVFQNYRKYSQHDMNKALDLELKGDIEKCLTTIVKCATSTPAFFAEKLYEAMKGAGTRHKTLIRIMVSRSEIDMNEIKVFYQKKYGIPLCQAILDETKGDYEKILVALCGGN

SEQ ID NO: 124 - protein, 346 aa, Cavia cutleri
MSMVSEFLKQAYFIDNQEQDYVKTVKSSKGGPGSAVSPYPSFDASSDVAALHKAITVKGVDEATIIDILTKRNNAQRQQIKAAYLQEKGKPLDEALKKALTGHLEEVVLALLKTPAQLDADELRAAMKGLGTDEDTLIEILVSRKNREIKEINRVYRDELKRDLAKDITSDTSGDFQKALLSLAKGDRCEDLSVNDDLADSDARALYEAGERRKGTDVNVFITILTTRSYSHLRRVFQKYTKYSQHDMNKALDLELKGDIENCLTAIVKCATSTPAFFAEKLHLAMKGAGTRHKALIRIMVSRSEIDMNDIKVYYQKMYGISLCQAILDETKGDYEKILVALCGGQ

SEQ ID NO: 125 - protein, 392 aa, Homo sapiens
MGVNQSVGFPPVTGPHLVGCGDVMEGQNLQGSFFRLFYPCQKAEETMEQPLWIPRYEYCTGLAEYLQFNKRCGGLLFNLAVGSCRLPVSWNGPFKTKDSGYPLIIFSHGLGAFRTLYSAFCMELASRGFVVAVPEHRDRSAATTYFCKQAPEENQPTNESLQEEWIPFRRVEEGEKEFHVRNPQVHQRVSECLRVLKILQEVTAGQTVFNILPGGLDLMTLKGNIDMSRVAVMGHSFGGATAILALAKETQFRCAVALDAWMFPLERDFYPKARGPVFFINTEKFQTMESVNLMKKICAQHEQSRIITVLGSVHRSQTDFAFVTGNLIGKFFSTETRGSLDPYEGQEVMVRAMLAFLQKHLDLKEDYNQWNNLIEGIGPSLTPGAPHHLSSL

SEQ ID NO: 126 - protein, 440 aa, Mus musculus
MVPLKLQALFCLLCCLPWVHPFHWQDTSSFDFRPSVMFHKLQSVMSAAGSGHSKIPKGNGSYPVGCTDLMFGYGNESVFVRLYYPAQDQGRLDTVWIPNKEYFLGLSIFLGTPSIVGNILHLLYGSLTTPASWNSPLRTGEKYPLIVFSHGLGAFRTIYSAIGIGLASNGFIVATVEHRDRSASATYFFEDQVAAKVENRSWLYLRKVKQEESESVRKEQVQQRAIECSRALSAILDIEHGDPKENVLGSAFDMKQLKDAIDETKIALMGHSFGGATVLQALSEDQRFRCGVALDPWMYPVNEELYSRTLQPLLFINSAKFQTPKDIAKMKKFYQPDKERKNDYNQGLRHQNFDDFTFVTGKIIGNKLTLKGEIDSRVAIDLTNKASMAFLQKHLGLQKDFDQWDPLVEGDDENLIPGSPFDAVTQAPAQQHSPGSQTQN

SEQ ID NO: 127 - protein, 444 aa, Canis familiaris
MLPPKLHALFCLCSCLTLVHPIDWQDLNPVAHIRSSAWANKIQALMAAASIRQSRIPKGNGSYSVGCTDLMFDYTNKGTFLRLYYPSQEDDHSDTLWIPNKEYFFGLSKYLGTPWLMGKILSFFFGSVTTPANWNSPLRTGEKYPLIVFSHGLGAFRTIYSAIGIDLASHGFIVAAIEHRDGSASATYYFKDQSAAEIGNKSWSYLQELKPGDEEIHVRNEQVQKRAKECSQALNLILDIDHGRPIKNVLDLEFDVEQLKDSIDRDKIAVIGHSFGGATVLQALSEDQRFRCGIALDAWMLPLDDAIYSRIPQPLFFINSERFQFPENIKKMKKCYSPDKERKMITIRGSVHQNFADFTFTTGKIVGYIFTLKGDIDSNVAIDLCNKASLAFLQKHLGLRKDFDQWDSLIEGKDENLMPGTNINITNEHDTLQNSPEAEKSNLD

SEQ ID NO: 128 - protein, 444 aa, Bos taurus
MLPSKLHALFCLCTCLALVYPFDWQDLNPVAYIESPAWVSKIQALMAAANIGQSKIPRGNGSYSVGCTDLMFDYTNKGTFLRLYYPSQDDDHSDTLWIPNKEYFLGLSKFLGTHWLVGKIMGLFFGSMTTPAAWNAHLRTGEKYPLIIFSHGLGAFRTIYSAIGIDLASHGFIVAAVEHRDGSASSTYYFKDQSAVEIGNKSWLYLRTLKRGEEEFPLRNEQLRQRAKECSQALSLILDIDHGRPVTNVLDLEFDVEQLKDSIDRDKIAIIGHSFGGATVIQTLSEDQRFRCGIALDAWMFPVGDEVYSRIPQPLFFINSERFQYPSNIIRMKKCFLPDRERKMITIRGSVHQNFVDFTFATSKIIGYLFTLKGDIDSNVAISLSNKASLAFLQKHLGLQKDFDQWDSLVEGEDHNLIPGTNINTTNHQAILQNSTGIERPNLD

SEQ ID NO: 129 - protein, 776 aa, Mus musculus; identical to SEQ ID NO: 108

SEQ ID NO: 130 - protein, 346 aa, Mus musculus
MAMVSEFLKQARFLENQEQEYVQAVKSYKGGPGSAVSPYPSFNVSSDVAALHKAIMVKGVDEATIIDILTKRTNAQRQQIKAAYLQENGKPLDEVLRKALTGHLEEVVLAMLKTPAQFDADELRGAMKGLGTDEDTLIEILTTRSNEQIREINRVYREELKRDLAKDITSDTSGDFRKALLALAKGDRCQDLSVNQDLADTDARALYEAGERRKGTDVNVFTTILTSRSFPHLRRVFQNYGKYSQHDMNKALDLELKGDIEKCLTTIVKCATSTPAFFAEKLYEAMKGAGTRHKALIRIMVSRSEIDMNEIKVFYQKKYGISLCQAILDETKGDYEKILVALCGGN

SEQ ID NO: 131 - protein, 46 aa, Macaca fascicularis
GLVTCEPGPFCHVQLCACDRKLVYCLKRNLWSYNPQYQYFPNILCS

SEQ ID NO: 132 - protein, 66 aa, Macaca fascicularis
LILAVIMIFGLLQAHGNLVDFRRMIKLKTGKEAALSYGFYGCHCGVGGKGAPKDATDRCCVVHDCC

SEQ ID NO: 133 - protein, 89 aa, Macaca fascicularis
FMLGLNLNTSYPLSPLSDFATQDSFDDDELDAAVADPDEFERIYEPLDVKSKKIHVVDSGLTFNLPYPLILRPQRGVDLIISFDFSARP

SEQ ID NO: 134 - protein, 25 aa, Homo sapiens
MIMALILMNLSEYMSLWMSKVKRFM

SEQ ID NO: 135 - protein, 329 aa, Rattus norvegicus
YFATGLQEEEKGAVHKRSFKVLEGLKKLNIQADQAPVIAVLGSGGGLRAHIACLGMLSAMKELGLLDAVTYLAGVSGSTWALSSFYTKNGNMQGMEEELKHRYEKNEWHFDESLDKAIQASRRENYSLTDFWAYLVVSRQTRELHDSNLSSFKKQVEEGVLPYPIFAAIDDDLHDDWREKKVQNSWFEFTPHHAGYPALRAYVPITEFGSRFENGKLVRPEPERDLTFLRGLWGSALADIKEDKAFIMDYFKDMYEKLKKKYLHRGGAKTVTYSNAEQMDVDEMFLDLLMAYAIDQDDPSIKDKLCDMQQALGPGTGEFGKEMAEIIHN

SEQ ID NO: 136 - protein, 1463 aa, Bos taurus; identical to SEQ ID NO: 11

SEQ ID NO: 137 - protein, 807 aa, Mus musculus
MQFFGRLVNTLSSVTNLFSNPFRVKEVSLTDYVSSERVREEGQLILLQNVSNRTWDCVLVSPRNPQSGFRLFQLESEADALVNFQQFSSQLPPFYESSVQVLHVEVLQHLTDLIRNHPSWTVTHLAVELGIRECFHHSRIISCANSTENEEGCTPLHLACRKGDSEILVELVQYCHAQMDVTDNKGETAFHYAVQGDNPQVLQLLGKNASAGLNQVNNQGLTPLHLACKMGKQEMVRVLLLCNARCNIMGPGGFPIHTAMKFSQKGCAEMIISMDSNQIHSKDPRYGASPLHWAKNAEMARMLLKRGCDVDSTSSSGNTALHVAVMRNRFDCVMVLLTYGANAGARGEHGNTPLHLAMSKDNMEMVKALIVFGAEVDTPNDFGETPALIASKISKLITRKALLTLLKTVGADHHFPIIQGVSTEQGSAAATHPLFSLDRTQPPAISLNNLELQDLMPISRARKPAFILSSMRDEKRSHDHLLCLDGGGVKGLVIIQLLIAIEKASGVATKDLFDWVAGTSTGGILALAILHSKSMAYMRGVYFRMKDEVFRGSRPYESGPLEEFLKREFGEHTKMTDVKKPKVMLTGTLSDRQPAELHLFRNYDAPEAVREPRCNQNINLKPPTQPADQLVWRAARSSGAAPTYFRPNGRFLDGGLLANNPTLDAMTEIHEYNQDMIRKGQGNKVKKLSIVVSLGTGKSPQVPVTCVDVFRPSNPWELAKTVFGAKELGKMVVDCCTDPDGRAVDRARAWCEMVGIQYFRLNPQLGSDIMLDEVSDAVLVNALWETEVYIYEHREEFQKLVQLLLSP

SEQ ID NO: 138 - protein, 806 aa, Homo sapiens; identical to SEQ ID NO: 22

SEQ ID NO: 139 - protein, 752 aa, Mus musculus; identical to SEQ ID NO: 44

SEQ ID NO: 140 - protein, 806 aa, Homo sapiens [sequence omitted]

SEQ ID NO: 141 - protein, 806 aa, Homo sapiens [sequence omitted]

SEQ ID NO: 142 - protein, 752 aa, Homo sapiens [sequence omitted]

SEQ ID NO: 143 - protein, 751 aa, Rattus norvegicus; identical to SEQ ID NO: 47

SEQ ID NO: 144 - protein, 1463 aa, Homo sapiens; identical to SEQ ID NO: 8

SEQ ID NO: 145 - protein, 752 aa, Homo sapiens; identical to SEQ ID NO: 61

SEQ ID NO: 146 - protein, 806 aa, Homo sapiens; identical to SEQ ID NO: 22

SEQ ID NO: 147 - protein, 1522 aa, Mus musculus
MAWSSRRVVASLASCSLVQSRGHGSDSRGCHLACLMVQWLAMLQLLWLQQLLLLGIHQGIAQDLTHIQEPSLEWRDKGIFIIQSESLKTCIQAGKSVLTLENCKQPNEHMLWKWVSDDHLFNVGGSGCLGLNISALEQPLKLYECDSTLISLRWHCDRKMIEGPLQYKVQVKSDNTVVARKQIHRWIAYTSSGGDICEHPSRDLYTLKGNAHGMPCVFPFQFKGHWHHDCIREGQKEHLLWCATTSRYEEDEKWGFCPDPTSMKVFCDATWQRNGSSRICYQFNLLSSLSWNQAHSSCLMQGGALLSIADEDEEDFIRKHLSKVVKEVWIGLNQLDEKAGWQWSDGTPLSYLNWSQEITPGPFVEHHCGTLEVVSAAWRSRDCESTLPYICKRDLNHTAQGILEKDSWKYHATHCDPDWTPFNRKCYKLKKDRKSWLGALHSCQSNDSVLMDVASLAEVEFLVSLLRDENASETWIGLSSNKIPVSFEWSSGSSVIFTNWYPLEPRILPNRRQLCVSAEESDGRWKVKDCKERLFYICKKAGQVPADEQSGCPAGWERHGRFCYKIDTVLRSFEEASSGYYCSPALLTITSRFEQAFITSLISSVAEKDSYFWIALQDQNNTGEYTWKTVGQREPVQYTYWNTRQPSNRGGCVVVRGGSSLGRWEVKDCSDFKAMSLCKTPVKIWEKTELEERWPFHPCYMDWESATGLASCFKVFHSEKVLMKRSWREAEAFCEEFGAHLASFAHIEEENFVNELLHSKFNWTQERQFWIGFNRRNPLNAGSWAWSDGSPVVSSFLDNAYFEEDAKNCAVYKANKTLLPSNCASKHEWICRIPRDVRPKFPDWYQYDAPWLFYQNAEYLFHTHPAEWATFEFVCGWLRSDFLTIYSAQEQEFIHSKIKGLTKYGVKWWIGLEEGGARDQIQWSNGSPVIFQNWDKGREERVDSQRKRCVFISSITGLWGTENCSVPLPSICKRVKIWVIEKEKPPTQPGTCPKGWLYFNYKCFLVTIPKDPRELKTWTGAQEFCVAKGGTLVSIKSELEQAFITMNLFGQTTNVWIGLQSTNHEKWVNGKPLVYSNWSPSDIINIPSYNTTEFQKHIPLCALMSSNPNFHFTGKWYFDDCGKEGYGFVCEKMQDTLEHHVNVSDTSAIPSTLEYGNRTYKIIRGNMTWYAAGKSCRMHRAELASIPDAFHQAFLTVLLSRLGHTHWIGLSTTDNGQTFDWSDGTKSPFTYWKDEESAFLGDCAFADTNGRWHSTACESFLQGAICHVVTETKAFEHPGLCSETSVPWIKFKGNCYSFSTVLDSRSFEDAHEFCKSEGSNLLAIRDAAENSFLLEELLAFGSSVQMVWLNAQFDNNNKTLRWFDGTPTEQSNWGLRKPDMDHLKPHPCVVLRIPEGIWHFTPCEDKKGFICKMEAGIPAVTAQPEKGLSHSIVPVTVTLTLIIALGIFMLCFWIYKQKSDIFQRLTGSRGSYYPTLNFSTAHLEENILISDLEKNTNDEEVRDAPATESKRGHKGRPICISP

SEQ ID NO: 148 - protein, 1522 aa, Mus musculus; identical to SEQ ID NO: 147

SEQ ID NO: 149 - protein, 390 aa, Mus musculus
MGAGQSVCFPPISGPHHIGCTDVMEGHSLEGSLFRLFYPCQASEKCEQPLWIPRYEYSMGLADYLQYNKRWVGLLFNVGIGSCRLPVSWNGPFKAKESGYPLIILSHGLGGFRASYSAFCMELASRGFVVAAVEHRDQSAAATYFCKPTSQESSPAESLEEEWLPFRRIKEGEKEFHVRNPQVHQRVKECVRVLRILQDASAGKTVVNVFPGGLDLMTLKGSVDTSRVAVMGHSFGGATAVLALTQEVQFRCAIALDAWMFPLERDFYPKARGPVFFINVEKFQTVESVNLMKKICAQHEQSRIVTVLGAVHRSQTDFAFVTGNLIAKFFSSNSRGTLDPYESQEVMVRAILAFLQKHLDLKEDYDQWSSFIEGVGPSLIQGAPHYLSSL

SEQ ID NO: 150 - protein, 390 aa, Rattus norvegicus
MGAGQSICFPPISGPHHIGCTDVMEGHSLEGSLFRLFYPCEASETCEQPLWIPRYEYCVGLADYLQYNKRWVGLLFNVGIGSCRLPVSWNGPFKTKESGYPLIILSHGLGGFRVSYSAFCMELASRGFVVAAIEHRDQSAAATYFCKQTSQESSPTESLEEEWIPFRRIKEGEKEFHVRNPQVHQRAKECVRVLQILQDASAGKPVINVFPGGLDLMTLKGSIDMSRVAVMGHSFGGATAILALTQEAQFRCAIALDAWMFPLEHDFYPKARGPVFFINVEKFQTVESVNLMKKICAQHEQSRIVTVLGAVHRSQTDFAFVTGNMIGKLFSSGTRGTLDPYEGQEVMVRAMLAFLQKHLDLKEDYDQWNSFIEGIGPSLIQGAPHYLSSL

SEQ ID NO: 151 - protein, 392 aa, Bos taurus [sequence omitted]

SEQ ID NO: 152 - protein, 436 aa, Cavia porcellus
MAPPKLHTLFCLSGFLALVHPFDWRDLDPVTYIQSSVWIQRIQSELLITSFGHTTIPKGNGPYSVGCTDLMSGYTNQSSFLRLYYPSQDNDFPDALWIPNEEYFQGLTETLGASSFLGKLLKLLYGSVKVPAKWNSPLKTGEKYPLIIFSHGLGAFRSIYSAIGIELASHGFIVAAVEHRDESAAATYYFQDAPAAESGNRSWIYYKVGNLETEERKRQLRQRGEECSQALSWLLSIDEGEPVKNVLDLNFDIQQLKGSLDRSKVAIIGHSFGGATVIQTLSEDQRFRCGIALDPWMFPVGEDVHSKIPQPLFFINSEYFQSANDTKKIEKFYQPQKERKMIAVKGSVHHNFVDFTFATGKIIGQMLSLKGKIDSEVAMDLINKASLAFLQKYLGLDKNFDQWNSLMEGDDENLIPEFTIPTTMQSSTGTEQRNPD

SEQ ID NO: 153 - protein, 752 aa, Equus caballus
MQFFGRLVNTLNSVSNLFSNPFRVKEVAVADYSSSSRVREEGQLILFQNTLHRTWDCVLVNPRNSKSGFRLFQLEVEADALVNFQQYSSLLPPFYESSSQVLHAEVLQQLSDLIRSHPSWSVAHLAVELGIRECFHHSRVISCANSVENEGGCTPLHLACRKGDGEILVELVQYCHAQMDVTDNSGETAFHYAVRGDNSQVLQLLGKNASAGLNQANNQGQTPLHLACQLGKQEMVRVLLLCNARCNIMGPGGCPIHTAMKFSQKGCAEMIISMDSNQIHSKDPHYGASPLHWAKNAEMARMLLKRGCDVNNTSSAGNTALHVAVMRNRFDCVMVLLTHGAHADARGEHGNTPLHLAMSKDNVEMVKALIVFGAEVDTPNDSGETPALLASKISKQLQDLMHISRARKPTFILSSMRDEKRTHDHLLCLDGGGVKGLVIIQLLIAIEKASGIATKDLFDWVAGTSTGGILALAILHSKSMAYMRCLYFRMKDEVFRGSRPYESGPLEEFLKREFGEHTKMTDVKKPKVMLTGTLSDRQPAELHLFRNYEAPECVREPRFSQNINLKPPTQPSDQLVWRAARSSGAAPTYFRPNGRFLDGGLLANNPTLDAMTEIHEYNQDLIRKGQDSKVKKLSVVVSLGTGRSPQVPVTCVDVSRPSNPWELPKTVLGAKELGKMVVDCCTDPDGRAVDRARAWCEMVGIQYFRLNPQLGTDIMLDEINDSVLVNALWETEVYIYEHREQFQKLIQLLLSP

SEQ ID NO: 154 - protein, 806 aa, Equus caballus
MQFFGRLVNTLNSVSNLFSNPFRVKEVAVADYSSSSRVREEGQLILFQNTLHRTWDCVLVNPRNSKSGFRLFQLEVEADALVNFQQYSSLLPPFYESSSQVLHAEVLQQLSDLIRSHPSWSVAHLAVELGIRECFHHSRVISCANSVENEGGCTPLHLACRKGDGEILVELVQYCHAQMDVTDNSGETAFHYAVRGDNSQVLQLLGKNASAGLNQANNQGQTPLHLACQLGKQEMVRVLLLCNARCNIMGPGGCPIHTAMKFSQKGCAEMIISMDSNQIHSKDPHYGASPLHWAKNAEMARMLLKRGCDVNNTSSAGNTALHVAVMRNRFDCVMVLLTHGAHADARGEHGNTPLHLAMSKDNVEMVKALIVFGAEVDTPNDSGETPALLASKISKLVTRKALLTLLRTVGADCQLPLVSVVPVQQGSAAAHHRVSLERSQPPPISLNNLELQDLMHISRARKPTFILSSMRDEKRTHDHLLCLDGGGVKGLVIIQLLIAIEKASGIATKDLFDWVAGTSTGGILALAILHSKSMAYMRCLYFRMKDEVFRGSRPYESGPLEEFLKREFGEHTKMTDVKKPKVMLTGTLSDRQPAELHLFRNYEAPECVREPRFSQNINLKPPTQPSDQLVWRAARSSGAAPTYFRPNGRFLDGGLLANNPTLDAMTEIHEYNQDLIRKGQDSKVKKLSVVVSLGTGRSPQVPVTCVDVSRPSNPWELPKTVLGAKELGKMVVDCCTDPDGRAVDRARAWCEMVGIQYFRLNPQLGTDIMLDEINDSVLVNALWETEVYIYEHREQFQKLIQLLLSP

SEQ ID NO: 155 - protein, 779 aa, Equus caballus
MSINLTVDIYIYLLSNARSLYGKQRSKQLHFLCSPEHYRSISHISLQRAFHTSKVRCKWTKSEAHSCSKHCYSPSDHGVHTGILKLSTSAPRGLTKVSIRMSRIKSTLNSVSKALFGKQNEMISCLAQFKPSSRILRKVSDSVWLKQKNVRQAIKSLKRYSDKSEEKSSFPEKKSHIIDKDKDIDKQSLFHYSTSITTKFGESFYFLSNHINSYFKREEKMSQKKENKHFQDNSELEDEKSSSPDSGVLTDEKQDSESSLHTVDKPSSPSGTPEVLPVSAKQSIANFLSRPTEGVQALVGGYIGGLVPKLKYNSKSQSEEQEEAGKAEQAVSKDKNAEEKKRLSLQREKIIARVSIDNRTRALVQALRRTTDPKLCINRVEELTFHLLEFPEGKGVAVKEKIIPCLLRLRQIKDETLQAAVREILALIGYVDPVKGRGIRILAIDGGGTRGVVALQTLRKLVELTQKPVHQLFDYICGVSTGAILAFMLGLFHMPLDECEELYRKLGSDVFSQNVIVGTVKMSWSHAFYDSQTWENILKDRMGSSLMIETARNPTCPKVAAVSTIVNRGITPKAFVFRNYGHFPGINSHYLGGCQYKMWQAIRASSAAPGYFEEYALGNDLHQDGGLLLNNPSALAMHECKCLWPDVPLECIVSLGTGRYESDVRNAVTYTSLKTKLSNVINSATDTEEVHIMLDGLLPPDTYFRFNPVMCENIPLDESRNEKLDQLQLEGLKYIERNEEKMKKLAKILSQEKTTLQKINDWIKLKTDMYEGLPFFSKL

SEQ ID NO: 156 - protein, 1471 aa, Ornithorhynchus anatinus
MLSGPLPALLLQLLQLLLQLLHRGPGGGCSLAGPPPVDEPASDLLGKGIFMIQSDYLRTCISSGKNGLVLQDCHQPTKNMLWKWVSKRHLFNLGSSGCLGLNISNEEQPLGLYECDSPHSSLWWHCNRKVVVGASQYALEIKNYNLVVARRQSSHGWVQYLSDGDDICEHPFQELYTIQGNSQGRPCVFPFRYNNQWFYECTKEGRKDGLLWCATTSQYEKDQTWGFCPNPGRYEIGCKVFWEKDPDTNICYQFNLNSFLSWNEARSSCKMQGGDLLSITHWKEENFIQKFLSVKEVKKVWIGLNQLDEVNGWQWSDGTPLIHLNWDPDVNFDPFVQYHCGTFNSLLWDSWQNHDCESPLPYVCKKHLNHTKRELLAEKNTWKYYPTHCEPSWHPYNGNCYRLQKEEKNWTAALHSCQSIKSKLINMASLAEVEFLVNLLKDENVSETWIGLSSGRNPVFFDWSGGSSATFTLWHKQQPNTFPNGSRLCVSADKTGGHWKVRNCEETLFYICKNAGKVLSEAKSGCQEGWERHGGFCYKIDLIRRSFDQASRGYYCPPSLVTVTNRFEQAFITNMISSVVKTEDSYFWIALQDQNVTGEYTWKVRGQEYQPVQYTNWNKYQPRYNGGCVVMRGGNPPGLWEVKDCQRFRAMSLCKQPLNPHPETQREKIWPFEPCFLGWESKPNLPSCYKVFHSEKVLMKRTWSEAEALCEDFGAHLASFSHIDEEDFVNEMVLSKFNRTEERQFWIGFNKRNPLSGGSWEWSDGTPVISSFLDDMYIGEDARNCAIYQTNKTVLPLRCGSKREWICKLPKDVRPMIPKWYQYDGPWLFHHGTEYLFHTSATEWANFELVCQLLDSNLLTIHSAEEQEFVQNKIKTLSKSDVNWWMGLHKMGPNDGFCWKDGSPLIFQNWDKGRERSGQNQRQRCGFISSETGLWGDDDCSVAMPSICKRKKIWITEKDLSEQPHGLCPKGWLYFGSKCFLVEIPKDPSKLKSWKSAQDSCAEEDGVLASIENEVEQAFITMNLFGQKANVWIGLQNSDYEEWLNGKHVAYSNWLPVDIINSQSLNTTKLREQVHLCALLSSNPNFHFTGKWYLEDCGKESYGYICEKMQDTSKHNTNASTMYPTSSTLQYGNRTFKVIGGNMTWYMALDICAANGAELVSITDQFRQSFLTVLVNQLGHAHWIGLFTSDNGLNFEWSDGTKSSFAYWEDESPSLGGCTLVDINGGWKSADCETLLQGAVCHVPTETSLSEFKGLCSETSFPWVKLKNNCYSFSTVLQSMSFDAAQKFCKGQGSNLLTIKEEVENSFLLEELHAYHSSVPMVWLNAQFDSNNGTITWFDGSPAELSNWGIREPDLDRFKTQLCIAMNTKDAVWQLCPCTEKKGFICKMETDANDLNIWAGKAPSHGFIPLAVTVTLIVILGFSTFSFCLYKLNSRLFRRFSAFRITYYTSTNSGIAPLEENILISDLERYD

SEQ ID NO: 157 - protein, 752 aa, Rattus norvegicus
MQFFGRLVNTLSSVTNLFSNPFRVKEVSLADYASSERVREEGQLILLQNASNRTWDCVLVSPRNPQSGFRLFQLESEADALVNFQQYSSQLPPFYESSVQVLHVEVLQHLTDLIRNHPSWTVTHLAVELGIRECFHHSRIISCANSTENEEGCTPLHLACRKGDSEILVELVQYCHAQMDVTDNKGETAFHYAVQGDNPQVLQLLGKNASAGLNQVNNQGLTPLHLACQMGKQEMVRVLLLCNARCNIMGPGGFPIHTAMKFSQKGCAEMIISMDSNQIHSKDPRYGASPLHWAKNAEMARMLLKRGCDVDSTSASGNTALHVAVTRNRFDCVMVLLTYGANAGARGEHGNTPLHLAMSKDNMEMVKALIVFGAEVDTPNDFGETPAFIASKISKQLQDLMPVSRARKPAFILSSMRDEKRSHDHLLCLDGGGVKGLVIIQLLIAIEKASGVATKDLFDWVAGTSTGGILALAILHSKSMAYMRGVYFRMKDEVFRGSRPYESGPLEEFLKREFGEHTKMTDVKKPKVMLTGTLSDRQPAELHLFRNYDAPEAVREPRCTPNINLKPPTQPADQLVWRAARSSGAAPTYFRPNGRFLDGGLLANNPTLDAMTEIHEYNQDMIRKGQGNKVKKLSIVVSLGTGKSPQVPVTCVDVFRPSNPWELAKTVFGAKELGKMVVDCCTDPDGRAVDRARAWCEMVGIQYFRLNPQLGSDIMLDEVSDAVLVNALWETEVYIYEHREEFQKLVQLLLSP

SEQ ID NO: 158 - protein, 752 aa, Rattus norvegicus; identical to SEQ ID NO: 157

SEQ ID NO: 159 - protein, 776 aa, Rattus norvegicus
MSINLTLDIYIYFLNNARSFCGKQRSKQLNFLCSKQYWRMNHVNVHREFHTSKKSCKWNRSEAHCSKHWHSSSNHGVHIGIVKLSTSAPKGLTKVSIHMSRIKSTLNSVSKAIFGSQNEMVSRLAQFKPSSRIFRKVSDRGWLKHKNVKQAIESLKNYSDKSAEKNSFAEQKSYFADKEEGSDKHSLYHYAYRITTRFGESFYFLANHINSYFKNKEKMSQIKEDRQLQDKPCLEESKSISPSPDILTDRPDSGPPLNVEDKLSSSTQLPEALPVSTKQSIANFLSRPTEGVQALVGGYIGGLVPKLKSDPKSQPEEEEEPSKTDEPICKDKKAEEKKRVLLQREKIIARVSIDNRTRALVQALRRTTDPKLCITRVEELTFHLLEFPEGKGVAVKEKIIPYLLRLRQIKDETLQAAVREILALIGYVDPVKGRGIRILAIDGGGTRGVVALQTLRKLVELTQKPIHQLFDYICGVSTGAILAFMLGLFHMPLDECEELYRKLGSDVFTQNVIVGTVKMSWSHAFYDSHTWEKILKDKVGSALMIETARDPLCPKVAAVSTIVNRGQTPKAFVFRNYGHFPGTNSHYLGGCQYKMWQAIRASSAAPGYFAEYALGNDLHQDGGLLLNNPSALALHECKCIWPDTPLECIVSLGTGRYESDVRNTTTYTSLKTKLSNVISSATDTEEVHIMLDGLLPADTYFRFNPVICENIPLDESRNEKLDQLQLEGMKYLERNDEKMKKLAKILSREKTTLQKISDWIKLKSDMYEGLPFFSKL

SEQ ID NO: 160 - protein, 1522 aa, Mus musculus
MAWSSRRVVASLASCSLVQSRGHGSDSRGCHLACLMVQWLAMLQLLWLQQLLLLGIHQGIAQDLTHIQEPSLEWRDKGIFIIQSESLKTCIQAGKSVLTLENCKQPNEHMLWKWVSDDHLFNVGGSGCLGLNISALEQPLKLYECDSTLISLRWHCDRKMIEGPLQYKVQVKSDNTVVARKQIHRWIAYTSSGGDICEHPSRDLYTLKGNAHGMPCVFPFQFKGHWHHDCIREGQKEHLLWCATTSRYEEDEKWGFCPDPTSMKVFCDATWQRNGSSRICYQFNLLSSLSWNQAHSSCLMQGGALLSIADEDEEDFIRKHLSKVVKEVWIGLNQLDEKAGWQWSDGTPLSYLNWSQEITPGPFVEHHCGTLEVVSAAWRSRDCESTLPYICKRDLNHTAQGILEKDSWKYHATHCDPDWTPFNRKCYKLKKDRKSWLGALHSCQSNDSVLMDVASLAEVEFLVSLLRDENASETWIGLSSNKIPVSFEWSSGSSVIFTNWYPLEPRILPNRRQLCVSAEESDGRWKVKDCKERLFYICKKAGQVPADEQSGCPAGWERHSRFCYKIDTVLRSFEEASSGYYCSPALLTITSRFEQAFITSLISSVAEKDSYFWIALQDQNNTGEYTWKTVGQREPVQYTYWNTRQPSNRGGCVVVRGGSSLGRWEVKDCSDFKAMSLCKTPVKIWEKTELEERWPFHPCYMDWESATGLASCFKVFHSEKVLMKRSWREAEAFCEEFGAHLASFAHIEEENFVNELLHSKFNWTQERQFWIGFNRRNPLNAGSWAWSDGSPVVSSFLDNAYFEEDAKNCAVYKANKTLLPSNCASKHEWICRIPRDVRPKFPDWYQYDAPWLFYQNAEYLFHTHPAEWATFEFVCGWLRSDFLTIYSAQEQEFIHSKIKGLTKYGVKWWIGLEEGGARDQIQWSNGSPVIFQNWDKGREERVDSQRKRCVFISSITGLWGTENCSVPLPSICKRVKIWVIEKEKPPTQPGTCPKGWLYFNYKCFLVTIPKDPRELKTWTGAQEFCVAKGGTLVSIKSELEQAFITMNLFGQTTNVWIGLQSTNHEKWVNGKPLVYSNWSPSDIINIPSYNTTEFQKHIPLCALMSSNPNFHFTGKWYFDDCGKEGYGFVCEKMQDTLEHHVNVSDTSAIPSTLEYGNRTYKIIRGNMTWYAAGKSCRMHRAELASIPDAFHQAFLTVLLSRLGHTHWIGLSTTDNGQTFDWSDGTKSPFTYWKDEESAFLGDCAFADTNGRWHSTACESFLQGAICHVVTETKAFEHPGLCSETSVPWIKFKGNCYSFSTVLDSRSFEDAHEFCKSEGSNLLAIRDAAENSFLLEELLAFGSSVQMVWLNAQFDNNNKTLRWFDGTPTEQSNWGLRKPDMDHLKPHPCVVLRIPEGIWHFTPCEDKKGFICKMEAGIPAVTAQPEKGLSHSIVPVTVTLTLIIALGIFMLCFWIYKQKSDIFQRLTGSRGSYYPTLNFSTAHLEENILISDLEKNTNDEEVRDAPATESKRGHKGRPICISP

SEQ ID NO: 161 - protein, 752 aa, Mus musculus; identical to SEQ ID NO: 44

SEQ ID NO: 162 - protein, 795 aa, Mus musculus
RPFPKPPGAPVLNVVTWTLLRTGLVSATLRHRGRLGLSAAPQRMQFFGRLVNTLSSVTNLFSNPFRVKEVSLTDYVSSERVREEGQLILLQNVSNRTWDCVLVSPRNPQSGFRLFQLESEADALVNFQQFSSQLPPFYESSVQVLHVEVLQHLTDLIRNHPSWTVTHLAVELGIRECFHHSRIISCANSTENEEGCTPLHLACRKGDSEILVELVQYCHAQMDVTDNKGETAFHYAVQGDNPQVLQLLGKNASAGLNQVNNQGLTPLHLACKMGKQEMVRVLLLCNARCNIMGPGGFPIHTAMKFSQKGCAEMIISMDSNQIHSKDPRYGASPLHWAKNAEMARMLLKRGCDVDSTSSSGNTALHVAVMRNRFDCVMVLLTYGANAGARGEHGNTPLHLAMSKDNMEMVKALIVFGAEVDTPNDFGETPALIASKISKQLQDLMPISRARKPAFILSSMRDEKRSHDHLLCLDGGGVKGLVIIQLLIAIEKASGVATKDLFDWVAGTSTGGILALAILHSKSMAYMRGVYFRMKDEVFRGSRPYESGPLEEFLKREFGEHTKMTDVKKPKVMLTGTLSDRQPAELHLFRNYDAPEAVREPRCNQNINLKPPTQPADQLVWRAARSSGAAPTYFRPNGRFLDGGLLANNPTLDAMTEIHEYNQDMIRKGQGNKVKKLSIVVSLGTGKSPQVPVTCVDVFRPSNPWELAKTVFGAKELGKMVVDCCTDPDGRAVDRARAWCEMVGIQYFRLNPQLGSDIMLDEVSDAVLVNALWETEVYIYEHREEFQKLVQLLLSP

SEQ ID NO: 163 - protein, 832 aa, Mus musculus
PGSWRLGACDPEQRGRLGLSAAPQRMQFFGRLVNTLSSVTNLFSNPFRVKEVSLTDYVSSERVREEGQLILLQNVSNRTWDCVLVSPRNPQSGFRLFQLESEADALVNFQQFSSQLPPFYESSVQVLHVEVLQHLTDLIRNHPSWTVTHLAVELGIRECFHHSRIISCANSTENEEGCTPLHLACRKGDSEILVELVQYCHAQMDVTDNKGETAFHYAVQGDNPQVLQLLGKNASAGLNQVNNQGLTPLHLACKMGKQEMVRVLLLCNARCNIMGPGGFPIHTAMKFSQKGCAEMIISMDSNQIHSKDPRYGASPLHWAKNAEMARMLLKRGCDVDSTSSSGNTALHVAVMRNRFDCVMVLLTYGANAGARGEHGNTPLHLAMSKDNMEMVKALIVFGAEVDTPNDFGETPALIASKISKLITRKALLTLLKTVGADHHFPIIQGVSTEQGSAAATHPLFSLDRTQPPAISLNNLELQDLMPISRARKPAFILSSMRDEKRSHDHLLCLDGGGVKGLVIIQLLIAIEKASGVATKDLFDWVAGTSTGGILALAILHSKSMAYMRGVYFRMKDEVFRGSRPYESGPLEEFLKREFGEHTKMTDVKKPKVMLTGTLSDRQPAELHLFRNYDAPEAVREPRCNQNINLKPPTQPADQLVWRAARSSGAAPTYFRPNGRFLDGGLLANNPTLDAMTEIHEYNQDMIRKGQGNKVKKLSIVVSLGTGKSPQVPVTCVDVFRPSNPWELAKTVFGAKELGKMVVDCCTDPDGRAVDRARAWCEMVGIQYFRLNPQLGSDIMLDEVSDAVLVNALWETEVYIYEHREEFQKLVQLLLSP

SEQ ID NO: 164 - protein, 777 aa, Mus musculus
PGSWRLGACDPEQRGRLGLSAAPQRMQFFGRLVNTLSSVTNLFSNPFRVKEVSLTDYVSSERVREEGQLILLQNVSNRTWDCVLVSPRNPQSGFRLFQLESEADALVNFQQFSSQLPPFYESSVQVLHVEVLQHLTDLIRNHPSWTVTHLAVELGIRECFHHSRIISCANSTENEEGCTPLHLACRKGDSEILVELVQYCHAQMDVTDNKGETAFHYAVQGDNPQVLQLLGKNASAGLNQVNNQGLTPLHLACKMGKQEMVRVLLLCNARCNIMGPGGFPIHTAMKFSQKGCAEMIISMDSNQIHSKDPRYGASPLHWAKNAEMARMLLKRGCDVDSTSSSGNTALHVAVMRNRFDCVMVLLTYGANAGARGEHGNTPLHLAMSKDNMEMVKALIVFGAEVDTPNDFGETPALIASKISKQLQDLMPISRARKPAFILSSMRDEKRSHDHLLCLDGGGVKGLVIIQLLIAIEKASGVATKDLFDWVAGTSTGGILALAILHSKSMAYMRGVYFRMKDEVFRGSRPYESGPLEEFLKREFGEHTKMTDVKKPKVMLTGTLSDRQPAELHLFRNYDAPEAVREPRCNQNINLKPPTQPADQLVWRAARSSGAAPTYFRPNGRFLDGGLLANNPTLDAMTEIHEYNQDMIRKGQGNKVKKLSIVVSLGTGKSPQVPVTCVDVFRPSNPWELAKTVFGAKELGKMVVDCCTDPDGRAVDRARAWCEMVGIQYFRLNPQLGSDIMLDEVSDAVLVNALWETEVYIYEHREEFQKLVQLLLSP

SEQ ID NO: 165 - protein, 775 aa, Monodelphis domestica
MSIHLTLDIYIYLLSNARSLCGKQRSKQLYLLCTSKYWRISYINQQRSFHISRTRYKWTRSHTFVSSKHSCNPRNHDLHIGVSKLSTSAPKGLTKVSIHMSRIKNTLDSVSKAVFGNQNEMFSRFSRFKPGILRKKSEDDVLKQKSVKQASGTNTLNDSSDNKTEKGPFPEEKGLEERKQNIYYTNYIIAKFEESLYFLSNHINSYFTNMTERTENDHLQQATEMKMGKDEAGIRESPSKDEVQLKEKGTDSQFLSPTVAHSEELTGTSDTLPVSVKQSFANFLARPSDSVQALVGGYIVGLVPKLKADAKYHSEEFQGGKAEQASGKENHEEEKKHLSLQREKIIERVSIDNRTRALVRALRRTTDHKLCINRIEELTFHLLAFPEARALAVKEKLVPYLLRLRRNKDEILQATVRENLALIGYTDPVKGRGIRILTIDGGGIRGVVALQSLRKIVELTKKPIHQLFDYICGVSTGAILAFMVGLFHMDLDDCEELYRKLGTDVFTQNLIIGTVKMGWKHEFYDSETWERILKDRLGSNLMIETARNPKCPKVAAVSTVVNRGIQPKAFVFRNYDLFPGSKSHYLGGCHHKVWQAIRASSAAPGYFAEYTLGKDLHQDGGLLLNNPTALAMHECKCLWPDTPLQCIVSLGTGRYEGDVRNYSMTATSLRSKLSTVISSATDTEEVHIMLDDFLPPDTYFRINPVMRENIPLDESRNEKLDFLQSESIKYLERNEEKIKKLTKILTQEKTALQKINDWLKLKSDMYEGFPFLSKL

SEQ ID NO: 166 - protein, 782 aa, Monodelphis domestica
MSIHLTLDIYIYLLSNARSLCGKQRSKQLYLLCTSKYWRISYINQQRSFHISRTRYKWTRSHTFVSSKHSCNPRNHDLHIGVSKLSTSAPKGLTKVSIHMSRIKNTLDSVSKAVFGNQNEMFSRFSRFKPGILRKKSEDDVLKQKSVKQASGTNTLNDSSDNKTEKGPFPEAKIDPVLEKGLEERKQNIYYTNYIIAKFEESLYFLSNHINSYFTNMTERTENDHLQQATEMKMGKDEAGIRESPSKDEVQLKEKGTDSQFLSPTVAHSEELTGTSDTLPVSVKQSFANFLARPSDSVQALVGGYIVGLVPKLKADAKYHSEEFQGGKAEQASGKENHEEEKKHLSLQREKIIERVSIDNRTRALVRALRRTTDHKLCINRIEELTFHLLAFPEARALAVKEKLVPYLLRLRRNKDEILQATVRENLALIGYTDPVKGRGIRILTIDGGGIRGVVALQSLRKIVELTKKPIHQLFDYICGVSTGAILAFMVGLFHMDLDDCEELYRKLGTDVFTQNLIIGTVKMGWKHEFYDSETWERILKDRLGSNLMIETARNPKCPKVAAVSTVVNRGIQPKAFVFRNYDLFPGSKSHYLGGCHHKVWQAIRASSAAPGYFAEYTLGKDLHQDGGLLLNNPTALAMHECKCLWPDTPLQCIVSLGTGRYEGDVRNYSMTATSLRSKLSTVISSATDTEEVHIMLDDFLPPDTYFRINPVMRENIPLDESRNEKLDFLQSESIKYLERNEEKIKKLTKILTQEKTALQKINDWLKLKSDMYEGFPFLSKL

SEQ ID NO: 167 - protein, 752 aa, Bos taurus
MQFFGRLVNTLSSVTNLFVNPFRVKEVAVEDYHSRRRVREEGQLILFQNSSNRTWDCILVNPRNAQSGFRLFQLETEADALVNFQQYSSQLPPFYESSTHILQAEVLQQLTDLIRSHPSWSVAHLAVELGIRECFHHSHIISCANNKENEEGCTPLHLACRKGDTEVLSELVQHCRANMDVTDNSGETAFHYAVQGDSSQVLQLLGKNASGGLNQVNNQGLTPLHLACQLGKQEMVRVLLLCNARCNIMGPGGYPIHTAMKFSQKGCAEMIVSMDSSQIHSKDPRYGASPLHWAKNAEMARLLLKRGCDVNGTSSAGNTALHVAVMRNRFDCVMVLLTHGANADARGEHGNTPLHLAMSKDNVEMIKALIVFGAEVDTPNDFGETPAFIASRISKQLQDITQISRARKPAFILSSMRDEKRTHDHLLCLDGGGVKGLVIIQLLIAIEKASGIATKDLFDWVAGTSTGGILALAILHSKSMAYMRGVYFRMKDEVFRGSRPYESGPLEEFLKREFGEHTKMTDVKKPKVMLTGTLSDRQPAELHLFRNYEAPECVREPRFSQNVNLKPPTHPSEQLVWRAARSSGAAPTYFRPNGRFLDGGLLANNPTLDAMTEIHEYNQDLIRKGQDSKVKKLSVVVSLGTGRSPQVPVTCVDVFRPSNPWELAKTVFGAKELGRMVVDCCTDPDGRAVDRARAWCEMVGIQYFRLNPQLGTDIMLDEINDTVLVNALWETEVYIYEHREQFQKLVQLLLSP

SEQ ID NO: 168 - protein, 805 aa, Bos taurus
MQFFGRLVNTLSSVTNLFVNPFRVKEVAVEDYHSRRRVREEGQLILFQNSSNRTWDCILVNPRNAQSGFRLFQLETEADALVNFQQYSSQLPPFYESSTHILQAEVLQQLTDLIRSHPSWSVAHLAVELGIRECFHHSHIISCANNKENEEGCTPLHLACRKGDTEVLSELVQHCRANMDVTDNSGETAFHYAVQGDSSQVLQLLGKNASGGLNQVNNQGLTPLHLACQLGKQEMVRVLLLCNARCNIMGPGGYPIHTAMKFSQKGCAEMIVSMDSSQIHSKDPRYGASPLHWAKNAEMARLLLKRGCDVNGTSSAGNTALHVAVMRNRFDCVMVLLTHGANADARGEHGNTPLHLAMSKDNVEMIKALIVFGAEVDTPNDFGETPAFIASRISKLVTRKALLTLLRTVGADYRFPLTQGFSTEQCSAAAPSFSMERSHPPPISLNNLELQDITQISRARKPAFILSSMRDEKRTHDHLLCLDGGGVKGLVIIQLLIAIEKASGIATKDLFDWVAGTSTGGILALAILHSKSMAYMRGVYFRMKDEVFRGSRPYESGPLEEFLKREFGEHTKMTDVKKPKVMLTGTLSDRQPAELHLFRNYEAPECVREPRFSQNVNLKPPTHPSEQLVWRAARSSGAAPTYFRPNGRFLDGGLLANNPTLDAMTEIHEYNQDLIRKGQDSKVKKLSVVVSLGTGRSPQVPVTCVDVFRPSNPWELAKTVFGAKELGRMVVDCCTDPDGRAVDRARAWCEMVGIQYFRLNPQLGTDIMLDEINDTVLVNALWETEVYIYEHREQFQKLVQLLLSP

SEQ ID NO: 169 - protein, 784 aa, Bos taurus
MSINLTIDLYYIYLLSNARSLCGKQRSKQLPFLCSPEHYWRISHISLQRGVHMSRIRCKWTKSEAHSCSKHCSPLSHHGLHLAVLRLSTSAPKGLTKVSPRMSRIKNTLNSVSKAVFGKQNEMISRLAQLKPSSRILRKVTDSGWLKQKSVKQTIKFLKKYSDKSAEKSSIPAKESQVIEKDDIGKPSLFHYTSNITTKFGESFYFLSSHINSYFKREEKMSQQNEDQHFQEKSELELKKVEDEKPSSPDPGILSDKKLDSEASLYSEDKPGSPSGTPEVLPISTKQSIANFLSRPTEGVQALVGGYIGGLVPKLKYDSKSQLEDQEEATKAEQAVSKDKNAEEKRRLSLQREKIIARVSIDNRTRALVQALRRTTDPRLCINRVEELTFHLLEFPEGKGVAVKEKIIPYLLRLRQIKDETLQAAVREILALIGYVDPVKGRGIRILSIDGGGTRGVVALQTLRKLVELTQKPVHQLFDYICGVSTGAILAFMLGLFHMPLDECEELYRKLGSDVFSQNVIVGTVKMSWSHAFYDSQTWENILKDRMGSSLMIETARNPKCPKVAAVSTIVNRGITPKAFVFRNYGHFPGINSHYLGGCQYKMWQAIRASSAAPGYFAEYALGNDLHQDGGLLLNNPSALAMHECKCLWPDVPLECIVSLGTGRYESDVRNNVTYTSLKTKLSNVINSATDTEEVHVMLDGLLPPDTYFRFNPVMCENIPLDESRNEKLNQLQLEGLKYIERNEEKMKKLAKILSQEKTTLQKINDWIKLKTDMYEGLPFFSKL

SEQ ID NO: 170 - protein, 1463 aa, Homo sapiens; identical to SEQ ID NO: 8

SEQ ID NO: 171 - protein, 1463 aa, Homo sapiens; identical to SEQ ID NO: 8

SEQ ID NO: 172 - protein, 1324 aa, Homo sapiens; identical to SEQ ID NO: 79

SEQ ID NO: 173 - protein, 782 aa, Homo sapiens; identical to SEQ ID NO: 110

SEQ ID NO: 174 - protein, 782 aa, Homo sapiens; identical to SEQ ID NO: 110

SEQ ID NO: 175 - protein, 682 aa, Homo sapiens
MSRIKSTLNSVSKAVFGNQNEMISRLAQFKPSSQILRKVSDSGWLKQKNIKQAIKSLKKYSDKSAEKSPFPEEKSHIIDKEEDIGKRSLFHYTSSITTKFGDSFYFLSNHINSYFKRKEKMSQQKENEHFRDKSELEDKKVEEGKLRSPDPGILAYKPGSESVHTVDKPTSPSAIPDVLQVSTKQSIANFLSRPTEGVQALVGGYIGGLVPKLKYDSKSQSEEQEEPAKTDQAVSKDRNAEEKKRLSLQREKIIARVSIDNRTRALVQALRRTTDPKLCITRVEELTFHLLEFPEGKGVAVKERIIPYLLRLRQIKDETLQAAVREILALIGYVDPVKGRGIRILSIDGGGTRGVVALQTLRKLVELTQKPVHQLFDYICGVSTGAILAFMLGLFHMPLDECEELYRKLGSDVFSQNVIVGTVKMSWSHAFYDSQTWENILKDRMGSALMIETARNPTCPKVAAVSTIVNRGITPKAFVFRNYGHFPGINSHYLGGCQYKMWQAIRASSAAPGYFAEYALGNDLHQDGGLLLNNPSALAMHECKCLWPDVPLECIVSLGTGRYESDVRNTVTYTSLKTKLSNVINSATDTEEVHIMLDGLLPPDTYFRFNPVMCENIPLDESRNEKLDQLQLEGLKYIERNEQKMKKVAKILSQEKTTLQKINDWIKLKTDMYEGLPFFSKL

SEQ ID NO: 176 - protein, 782 aa, Homo sapiens; identical to SEQ ID NO: 110

SEQ ID NO: 177 - protein, 806 aa, Homo sapiens; identical to SEQ ID NO: 22

SEQ ID NO: 178 - protein, 752 aa, Homo sapiens; identical to SEQ ID NO: 61

SEQ ID NO: 179 - protein, 752 aa, Mus musculus
MQFFGRLVNTLSSVTNLFSNPFRVKEVSLTDYVSSERVREEGQLILLQNVSNRTWDCVLVSPRNPQSGFRLFQLESEADALVNFQQFSSQLPPFYESSVQVLHVEVLQHLTDLIRNHPSWTVTHLAVELGIRECFHHSRIISCANSTENEEGCTPLHLACRKGDSEILVELVQYCHAQMDVTDNKGETAFHYAVQGDNPQVLQLLGKNASAGLNQVNNQGLTPLHLACKMGKQEMVRVLLLCNARCNIMGLGGFPIHTAMKFSQKGCAEMIISMDSNQIHSKDPRYGASPLHWAKNAEMARMLLKRGCDVDSTSSSGNTALHVAVMRNRFDCVMVLLTYGANAGARGEHGNTPLHLAMSKDNMEMVKALIVFGAEVDTPNDFGETPALIASKISKQLQDLMPISRARKPAFILSSMRDEKRSHDHLLCLDGGGVKGLVIIQLLIAIEKASGVATKDLFDWVAGTSTGGILALAILHSKSMAYMRGVYFRMKDEVFRGSRPYESGPLEEFLKREFGEHTKMTDVKKPKVMLTGTLSDRQPAELHLFRNYDAPEAVREPRCNQNINLKPPTQPADQLVWRAARSSGAAPTYFRPNGRFLDGGLLANNPTLDAMTEIHEYNQDMIRKGQGNKVKKLSIVVSLGTGKSPQVPVTCVDVFRPSNPWELAKTVFGAKELGKMVVDCCTDPDGRAVDRARAWCEMVGIQYFRLNPQLGSDIMLDEVSDAVLVNALWETEVYIYEHREEFQKLVQLLLSP

SEQ ID NO: 180 - protein, 752 aa, Mus musculus; identical to SEQ ID NO: 44

SEQ ID NO: 181 - protein, 782 aa, Pan troglodytes
MSINLTVDIYIYLLSNARSVCGKQRSKQLYFLFSPKHYWRISHISLQRGFHTNIIRCKWTKSEAHSCSKHCYSPSNHGLHIGILKLSTSAPKGLTKVNICMSRIKSTLNSVSKAVFGNQNEMISRLAQFKPSSQILRKVSDSGWLKQKNIKQAIKSLKKYSDKSAEKSPFPEEKSHIIDEEEDIGKRSLFHYTSSITTKFGDSFYFLSNHINSYFKRKEKMSQQKENEHFRDKSELEDKKVEEGKLRSPDPDILAYKPGSESVHTVNKPTSPSAIPDVLQVSTKQSIANFLSRPTEGVQALVGGYIGGLVPKLKYDSKSQSEEQEEPAKTDQAVSKDRNAEEKKRLSLQREKIIARVSIDNRTRALVQALRRTTDPKLCITRVEELTFHLLEFPEGKGVAVKERIIPYLLRLRQIKDETLQAAVREILALIGYVDPVKGRGIRILSIDGGGTRGVVALQTLRKLVELTQKPVHQLFDYICGVSTGAILAFMLGLFHMPLDECEELYRKLGSDVFSQNVIVGTVKMSWSHAFYDSQTWENILKDRMGSALMIETARNPTCPKVAAVSTIVNRGITPKAFVFRNYGHFPGINSHYLGGCQYKMWQAIRASSAAPGYFAEYALGNDLHQDGGLLLNNPSALAMHECKCLWPDVPLECIVSLGTGRYESDVRNTVTYTSLKTKLSNVINSATDTEEVHIMLDGLLPPDTYFRFNPVMCENIPLDESRNEKLDQLQLEGLKYIERNEQKMKKVAKILSQEKTTLQKINDWIKLKTDMYEGLPFFSKL

SEQ ID NO: 182 - protein, 782 aa, Pan troglodytes; identical to SEQ ID NO: 181

SEQ ID NO: 183 - protein, 682 aa, Pan troglodytes
MSRIKSTLNSVSKAVFGNQNEMISRLAQFKPSSQILRKVSDSGWLKQKNIKQAIKSLKKYSDKSAEKSPFPEEKSHIIDEEEDIGKRSLFHYTSSITTKFGDSFYFLSNHINSYFKRKEKMSQQKENEHFRDKSELEDKKVEEGKLRSPDPDILAYKPGSESVHTVNKPTSPSAIPDVLQVSTKQSIANFLSRPTEGVQALVGGYIGGLVPKLKYDSKSQSEEQEEPAKTDQAVSKDRNAEEKKRLSLQREKIIARVSIDNRTRALVQALRRTTDPKLCITRVEELTFHLLEFPEGKGVAVKERIIPYLLRLRQIKDETLQAAVREILALIGYVDPVKGRGIRILSIDGGGTRGVVALQTLRKLVELTQKPVHQLFDYICGVSTGAILAFMLGLFHMPLDECEELYRKLGSDVFSQNVIVGTVKMSWSHAFYDSQTWENILKDRMGSALMIETARNPTCPKVAAVSTIVNRGITPKAFVFRNYGHFPGINSHYLGGCQYKMWQAIRASSAAPGYFAEYALGNDLHQDGGLLLNNPSALAMHECKCLWPDVPLECIVSLGTGRYESDVRNTVTYTSLKTKLSNVINSATDTEEVHIMLDGLLPPDTYFRFNPVMCENIPLDESRNEKLDQLQLEGLKYIERNEQKMKKVAKILSQEKTTLQKINDWIKLKTDMYEGLPFFSKL

SEQ ID NO: 184 - protein, 682 aa, Pan troglodytes; identical to SEQ ID NO: 183

SEQ ID NO: 185 - protein, 1327 aa, Pan troglodytes
MLLSPSLLLLLLLLLLGAPRGCAEGVAAALTPERLLEWQDKGIFVIQSESLKKCIQAGKSVLTLENCKQANKHMLWKWVSNHGLFNIGGSGCLGLNFSAPEQPLSLYECDSTLVSLRWRCNRKMITGPLQYSVQVAHDNTVVASRKYFHKWISYGSGGGDICEYLHKDLHTIKGNTHGMPCMFPFQYNHQWHHECTREGREDDLLWCATTSRYERDEKWGFCPDPTSAEVGCDTIWEKDLNSHICYQFNLLSSLSWSEAHSSCQMQGGALLSITDETEENFIREHMSSKTVEVWMGLNQLDEHAGWQWSDGTPLNYLNWSPEVNFEPFVEDHCGTFSSFMPSAWRSRDCESTLPYICKKYLNHIDHEIVEKDAWKYYATHCEPGWNPYNRNCYKLQKEEKTWHEALRSCQADNSALIDITSLAEVEFLVTLLGDENASETWIGLSSNKIPVSFEWSNDSSVIFTNWHTLEPHIFPNRSQLCVSAEQSEGHWKVKNCEERLFYICKKAGHVLSDAESGCQEGWERHGGFCYKIDTVLRSFDQASSGYYCPPALVTITNRFEQAFITSLISSVVKMKDSYFWIALQDQNDTGEYTWKPVGQKPEPVQYTHWNAHQPRYSGGCVAMRGRHPLGRWEVKHCRHFKAMSLCKQPVENQEKAEYEERWPFHPCYLDWESEPGLASCFKVFHSEKVLMKRTWREAEAFCEEFGAHLASFAHIEEENFVNELLHSKFNWTEERQFWIGFNKRNPLNAGSWEWSDRTPVVSSFLDNNYFGEDARNCAVYKANKTLLPLHCGSKREWICKIPRDVKPKIPFWYQYDVPWLFYQDAEYLFHTFASEWLNFEFVCSWLHSDLLTIHSAHEQEFIHSKIKALSKYGASWWIGLQEERANDEFRWRDGTPVIYQNWDTGRERTVNNQSQRCGFISSITGLWGSEECSVSMPSICKRKKVWLIEKKKDTPKQHGTCPKGWLYFNYKCLLLNIPKDPSSWKNWTHAQHFCAEEGGTLVAIESEVEQAFITMNLFDQTTSVWIGLQNDDYETWLNGKPVVYSNWSPFDIINIPSHNTTEVQKHIPLCALLSSNPNFHFTGKWYFEDCGKEGYGFVCEKMQDTSGHGVNTSDMYPMPNTLEYGNRTYKIINANMTWYAAIKTCLMHKAQLVSITDQYHQSFLTVVLNRLGYAHWIGLFTTDNGLNFDWSDGTKSSFTFWKDEESSLLGDCVFADSNGRWHSTACESFLQGAICHVPPETRQSEHPELCSETSIPWIKFKSNCYSFSTVLDSMSFEAAHEFCKKKGSNLLTIKDEAENAFLLEELFAFGSSVQMVWLNAQFDGNSK

SEQ ID NO: 186 - protein, 1466 aa, Pan troglodytes
MLLSPSLLLLLLLLLLGAPRGCAEGVAAALTPERLLEWQDKGIFVIQSESLKKCIQAGKSVLTLENCKQANKHMLWKWVSNHGLFNIGGSGCLGLNFSAPEQPLSLYECDSTLVSLRWRCNRKMITGPLQYSVQVAHDNTVVASRKYFHKWISYGSGGGDICEYLHKDLHTIKGNTHGMPCMFPFQYNHQWHHECTREGREDDLLWCATTSRYERDEKWGFCPDPTSAEVGCDTIWEKDLNSHICYQFNLLSSLSWSEAHSSCQMQGGALLSITDETEENFIREHMSSKTVEVWMGLNQLDEHAGWQWSDGTPLNYLNWSPEVNFEPFVEDHCGTFSSFMPSAWRSRDCESTLPYICKKYLNHIDHEIVEKDAWKYYATHCEPGWNPYNRNCYKLQKEEKTWHEALRSCQADNSALIDITSLAEVEFLVTLLGDENASETWIGLSSNKIPVSFEWSNDSSVIFTNWHTLEPHIFPNRSQLCVSAEQSEGHWKVKNCEERLFYICKKAGHVLSDAESGCQEGWERHGGFCYKIDTVLRSFDQASSGYYCPPALVTITNRFEQAFITSLISSVVKMKDSYFWIALQDQNDTGEYTWKPVGQKPEPVQYTHWNAHQPRYSGGCVAMRGRHPLGRWEVKHCRHFKAMSLCKQPVENQEKAEYEERWPFHPCYLDWESEPGLASCFKVFHSEKVLMKRTWREAEAFCEEFGAHLASFAHIEEENFVNELLHSKFNWTEERQFWIGFNKRNPLNAGSWEWSDRTPVVSSFLDNNYFGEDARNCAVYKANKTLLPLHCGSKREWICKIPRDVKPKIPFWYQYDVPWLFYQDAEYLFHTFASEWLNFEFVCSWLHSDLLTIHSAHEQEFIHSKIKALSKYGASWWIGLQEERANDEFRWRDGTPVIYQNWDTGRERTVNNQSQRCGFISSITGLWGSEECSVSMPSICKRKKVWLIEKKKDTPKQHGTCPKGWLYFNYKCLLLNIPKDPSSWKNWTHAQHFCAEEGGTLVAIESEVEQAFITMNLFDQTTSVWIGLQNDDYETWLNGKPVVYSNWSPFDIINIPSHNTTEVQKHIPLCALLSSNPNFHFTGKWYFEDCGKEGYGFVCEKMQDTSGHGVNTSDMYPMPNTLEYGNRTYKIINANMTWYAAIKTCLMHKAQLVSITDQYHQSFLTVVLNRLGYAHWIGLFTTDNGLNFDWSDGTKSSFTFWKDEESSLLGDCVFADSNGRWHSTACESFLQGAICHVPPETRQSEHPELCSETSIPWIKFKSNCYSFSTVLDSMSFEAAHEFCKKKGSNLLTIKDEAENAFLLEELFAFGSSVQMVWLNAQFDGNNETIKWFDGTPTDQSNWGIRKSDTDYFKPHHCVALRIPEGLWQLSPCQEKKGFICKMEADIRTAESLPEKGPSHSIIPLAVVLTLIVIVAICTLSFCIYKHNGGFFRRLAGFRNPYYPATNFSTVHLEENILISDLEKSDQ

SEQ ID NO: 187 - protein, 807 aa, Rattus norvegicus; identical to SEQ ID NO: 63

SEQ ID NO: 188 - protein, 806 aa, Homo sapiens; identical to SEQ ID NO: 22

SEQ ID NO: 189 - protein, 752 aa, Homo sapiens; identical to SEQ ID NO: 61

SEQ ID NO: 190 - protein, 1493 aa, Rattus norvegicus
  misc_feature (1462)..(1462): Xaa can be any naturally occurring amino acid
  misc_feature (1465)..(1465): Xaa can be any naturally occurring amino acid
  misc_feature (1486)..(1486): Xaa can be any naturally occurring amino acid
MAQWLAMLQLLWLQQLLLGVHQGSAQDLTHTQELALEWRDKGIFIIQSESLKTCIQAGKSVLTLENCTQPNEYMLWKWVSDNHLFNVGASGCLGLNISDLKRPLSLYECDSTLISLRWLCDRKTIVGPLQYKVQVNHSTVVAKKTPHKWSAYMPGGGDICEHLHRDIYTLKGNAHGMPCVFPFQFKGQWHHECIREGHKEHLLWCATTSRYEEDEKWGFCPDPTSTEIFCDAMWQRNDNSHICYQFNLLSSLSWNEAHSSCQMQGGALLSITDENEEAFIRKELSRVAKEVWTGLNQLDEMAGWQWSDGTPLSYLNWSQEVTAGPFVEYHCGTLKVASATWRSMDCESTLPYICKRHLNHTAEDILQKDSWKYHTTHCDPGWTPFNRKCYKLKKEKRTWQEALHSCQSDDSMLMDVTSLAEVELLVNLLGDENASETWIGLSSNKIPVSFAWSSGSSVIFTNWYLLEPRILPNRRQLCVSADQSDGRWKVKGCKETLPYICKKAGQVLEDEDSGCQAGWERHGKYCYKIDTVLRSFEQASGGYYCPPALLTITSRFEQAFITSLISSVARKDSYFWIALQDQNNTGEYTWKTMGQREPVQYTHWNAHQPSYHGGCVVLRGGSSFGRWEVKNCSDFKAMSLCKTPIKVWEKTEFEGRWPFHPCYMDWESETGLASCFKVFHSEKVLMKRSWREAEAFCEEFGAHLASFAHIEEENFVNKLLHSKFNWTQERQFWIGFNKRNPLNAGSWEWSDGSPVVSSFLDNAYFEEDAKNCAVYKANNTLLPSNCASKHEWICKIPRDVKPNFPVWYQYDAPWLFYQNAEYLFHTHPAEWATFEFVCGWLRSDFLTIYSAQEQEFIHSKIRALSKYGANWWIGLEDRRAGDQIHWSNGSPVIFQNWDKGRKGRMDSQRKRCVFMSAITGLWGTENCSVPMPSICKRVKIWVIEKEKPPTQHGTCPKGWLYFNYKCFLVTIPKDPRELKTWTGAQEFCAAKGGTLVSIESELEQAFITVNLFGQTTNVWIGLQSDNHENWVNGKPVVYSNWSPSDVINIPNYNTTEVQKRAPLCALMSSNPNFHFTGKWYFDDCGKKGYGFVCEKMQDTLENHVNVSDTYAVPSTLEYGNRTYKIIRANMTWYAAGKSCRMQGAELVSIPDVFHQSFLTVLLSRLGHAHWIGLSTPDNGLNFDWSDGTKSPFTYWKDEESASLGDCVFADTDGHWHGTACESHLQGAVCRVLTETKSFEHPVLCSETSVPWIRFKGHCYSFSTVLDSRSFEDAREFCKREGSNLLAIKDEAENLFLLEELLALGSSVQMVWLNAQLDNDNKTLRWFDGAATEQSNWGVRKPDMDHLKPHPCVVLRIPEGVWQSTPCEDKTGFICKVEAGIPAVTAHPEKGLSHSIMPVAAALALTIVLGILVLCLWIYKQNGGAILPRLTGSRGPYYPMSSFSMAHLEENILISDLEKNNQXRSXSCSNYGEQRRPRRASCLHFPXTSCPYNV

SEQ ID NO: 191 - protein, 1493 aa, Rattus norvegicus
  misc_feature (1462)..(1462): Xaa can be any naturally occurring amino acid
  misc_feature (1465)..(1465): Xaa can be any naturally occurring amino acid
  misc_feature (1486)..(1486): Xaa can be any naturally occurring amino acid
MAQWLAMLQLLWLQQLLLGVHQGSAQDLTHTQELALEWRDKGIFIIQSESLKTCIQAGKSVLTLENCTQPNEYMLWKWVSDNHLFNVGASGCLGLNISDLKRPLSLYECDSTLISLRWLCDRKTIVGPLQYKVQVNHSTVVAKKTPHKWSAYMPGGGDICEHLHRDIYTLKGNAHGMPCVFPFQFKGQWHHECIREGHKEHLLWCATTSRYEEDEKWGFCPDPTSTEIFCDAMWQRNDNSHICYQFNLLSSLSWNEAHSSCQMQGGALLSITDENEEAFIRKELSRVAKEVWTGLNQLDEMAGWQWSDGTPLSYLNWSQEVTAGPFVEYHCGTLKVASATWRSMDCESTLPYICKRHLNHTAEDILQKDSWKYHTTHCDPGWTPFNRKCYKLKKEKRTWQEALHSCQSDDSMLMDVTSLAEVELLVNLLGDENASETWIGLSSNKIPVSFAWSSGSSVIFTNWYLLEPRILPNRRQLCVSADQSDGRWKVKGCKETLPYICKKAGQVLEDEDSGCQAGWERHGKYCYKIDTVLRSFEQASGGYYCPPALLTITSRFEQAFITSLISSVARKDSYFWIALQDQNNTGEYTWKTMGQREPVQYTHWNAHQPSYHGGCVVLRGGSSFGRWEVKNCSDFKAMSLCKTPIKVWEKTEFEGRWPFHPCYMDWESETGLASCFKVFHSEKVLMKRSWREAEAFCEEFGAHLASFAHIEEENFVNKLLHSKFNWTQERQFWIGFNKRNPLNAGSWEWSDGSPVVSSFLDNAYFEEDAKNCAVYKANNTLLPSNCASKHEWICKIPRDVKPNFPVWYQYDAPWLFYQNAEYLFHTHPAEWATFEFVCGWLRSDFLTIYSAQEQEFIHSKIRALSKYGANWWIGLEDRRAGDQIHWSNGSPVIFQNWDKGRKGRMDSQRKRCVFMSAITGLWGTENCSVPMPSICKRVKIWVIEKEKPPTQHGTCPKGWLYFNYKCVCVCVPKDPRELKTWTGAQEFCAAKGGTLVSIESELEQAFITVNLFGQTTNVWIGLQSDNHENWVNGKPVVYSNWSPSDVINIPNYNTTEVQKRAPLCALMSSNPNFHFTGKWYFDDCGKKGYGFVCEKMQDTLENHVNVSDTYAVPSTLEYGNRTYKIIRANMTWYAAGKSCRMQGAELVSIPDVFHQSFLTVLLSRLGHAHWIGLSTPDNGLNFDWSDGTKSPFTYWKDEESASLGDCVFADTDGHWHGTACESHLQGAVCRVLTETKSFEHPVLCSETSVPWIRFKGHCYSFSTVLDSRSFEDAREFCKREGSNLLAIKDEAENLFLLEELLALGSSVQMVWLNAQLDNDNKTLRWFDGAATEQSNWGVRKPDMDHLKPHPCVVLRIPEGVWQSTPCEDKTGFICKVEAGIPAVTAHPEKGLSHSIMPVAAALALTIVLGILVLCLWIYKQNGGAILPRLTGSRGPYYPMSSFSMAHLEENILISDLEKNNQXRSXSCSNYGEQRRPRRASCLHFPXTSCPYNV

SEQ ID NO: 192 - protein, 620 aa, Macaca mulatta
MSRIKSTLNSVSKAIFGNRNEMISRLVQFKPSSQILRKVSDSGWLKQKNIKQAIKSLKKYSDKSAEKSPFPEEKSHIIDKEENRGKRSLFHYTNIITTKFGESFYFLSNHINSYFKRKEKMSQEKENEHFQDKSKLEDKEVEEGKLSSPDPGILAYKPGSESLDTVDKPTSPSAIPDVLPISTKQSIANLLSRPTEGVQALVGGYIGGLVPKLKYDSKSQSEEQEEPAKTDQAVSRDRNAEEKKRLSLQREKIIARVSIDNRTRALVQALRRTTDPKLCITRVEELTFHLLEFPEGKGVAVKERIIPYLLRLRQTKDETLQAAVREILALIGYVDPVKGRGIRILSIDGGGTRGVVALQTLRKLVELTQKPVHQLFDYICGVSTGAILAFMLGLFHMPLDECEELYRKLGSDVFSQNVIVGTVKMSWSHAFYDSQAWENILRDRMGSALMIETARNPTCPKVAADGGLLLNNPSALAMHECKCLWPDVPLECIVSLGTGRYESDVRNTVTHTSLKTKLSNVINSATDTEEVHIMLDGLLPPDTYFRFNPVMCENIPLDESRNEKLDQLQLEGLKYIERNEQKMKKVAKILSQEKTTLQKINDWIKLKTDMYEGLPFFSKL

SEQ ID NO: 193 - protein, 782 aa, Macaca mulatta
MSINLTVDIYIYLLSNARSVCGKQRSKQLHFLFSPKHCWRISHISLQRGFHTNIIRCKWTKSEAHSCSKHCYSPSNHGLHIGILKLSTSAPKGLTKVNICMSRIKSTLNSVSKAIFGNRNEMISRLVQFKPSSQILRKVSDSGWLKQKNIKQAIKSLKKYSDKSAEKSPFPEEKSHIIDKEENRGKRSLFHYTNIITTKFGESFYFLSNHINSYFKRKEKMSQEKENEHFQDKSKLEDKEVEEGKLSSPDPGILAYKPGSESLDTVDKPTSPSAIPDVLPISTKQSIANLLSRPTEGVQALVGGYIGGLVPKLKYDSKSQSEEQEEPAKTDQAVSRDRNAEEKKRLSLQREKIIARVSIDNRTRALVQALRRTTDPKLCITRVEELTFHLLEFPEGKGVAVKERIIPYLLRLRQTKDETLQAAVREILALIGYVDPVKGRGIRILSIDGGGTRGVVALQTLRKLVELTQKPVHQLFDYICGVSTGAILAFMLGLFHMPLDECEELYRKLGSDVFSQNVIVGTVKMSWSHAFYDSQAWENILRDRMGSALMIETARNPTCPKVAAVSTIVNRGITPKAFVFRNYGHFPGNNSHYLGGCQYKMWQAIRASSAAPGYFAEYALGNDLHQDGGLLLNNPSALAMHECKCLWPDVPLECIVSLGTGRYESDVRNTVTHTSLKTKLSNVINSATDTEEVHIMLDGLLPPDTYFRFNPVMCENIPLDESRNEKLDQLQLEGLKYIERNEQKMKKVAKILSQEKTTLQKINDWIKLKTDMYEGLPFFSKL

SEQ ID NO: 194 - protein, 782 aa, Macaca mulatta; identical to SEQ ID NO: 193

SEQ ID NO: 195 - protein, 782 aa, Macaca mulatta; identical to SEQ ID NO: 193

SEQ ID NO: 196 - protein, 682 aa, Macaca mulatta
MSRIKSTLNSVSKAIFGNRNEMISRLVQFKPSSQILRKVSDSGWLKQKNIKQAIKSLKKYSDKSAEKSPFPEEKSHIIDKEENRGKRSLFHYTNIITTKFGESFYFLSNHINSYFKRKEKMSQEKENEHFQDKSKLEDKEVEEGKLSSPDPGILAYKPGSESLDTVDKPTSPSAIPDVLPISTKQSIANLLSRPTEGVQALVGGYIGGLVPKLKYDSKSQSEEQEEPAKTDQAVSRDRNAEEKKRLSLQREKIIARVSIDNRTRALVQALRRTTDPKLCITRVEELTFHLLEFPEGKGVAVKERIIPYLLRLRQTKDETLQAAVREILALIGYVDPVKGRGIRILSIDGGGTRGVVALQTLRKLVELTQKPVHQLFDYICGVSTGAILAFMLGLFHMPLDECEELYRKLGSDVFSQNVIVGTVKMSWSHAFYDSQAWENILRDRMGSALMIETARNPTCPKVAAVSTIVNRGITPKAFVFRNYGHFPGNNSHYLGGCQYKMWQAIRASSAAPGYFAEYALGNDLHQDGGLLLNNPSALAMHECKCLWPDVPLECIVSLGTGRYESDVRNTVTHTSLKTKLSNVINSATDTEEVHIMLDGLLPPDTYFRFNPVMCENIPLDESRNEKLDQLQLEGLKYIERNEQKMKKVAKILSQEKTTLQKINDWIKLKTDMYEGLPFFSKL

SEQ ID NO: 197 - protein, 682 aa, Macaca mulatta; identical to SEQ ID NO: 196

SEQ ID NO: 198 - protein, 666 aa, Oryctolagus cuniculus; identical to SEQ ID NO: 118
  misc_feature (278)..(278): Xaa can be any naturally occurring amino acid

SEQ ID NO: 199 - protein, 786 aa, Oryctolagus cuniculus; identical to SEQ ID NO: 54

SEQ ID NO: 200 - protein, 1499 aa, Canis familiaris
MRAESQEGQAHFSTVLWDCSFKYNAHAASIRNSLLIGLESRIKNPDFLHHSAMNRTRFSGLQHPFLLQSNLNKGMFLIQSESLKKCIQAGKSVLTLENCKPPNKHMLWKWVSNHHLFNIGGSGCLGLNLSNPEQPLSIYECDSTHVSLRWHCNKNMIIGPLQYTVQVNDNNMLVASWKYLHKWISYLSDGGSICEYLHKDMYTIKGNAHGMPCMFPFQYNRQWHHECTQEGREDDLLWCATTSRYERDEKWGFCPDPTSTEVGCDAVWEKDLNSHICYQFNLLSSLSWSEAHSSCQMQGGALLSIADENEENFIRKHLGSEAVEMWMGLNQLDENAGWQWSDRTPLNYLNWNPEINFEPFVEYHCGTFNSFLPSAWRSRDCESTLPYICKKYLNNTDQEVIEKDAWKYYTTHCEPGWNPHSHNCYKLQKEKRTWNEALHSCQSDNSTLINIASLADVEFFVTLLGDENASETWIGLSSNKIPVSFEWSNGSSVTFTNWHTLEPQIFPNGSQQCVSAEQSEGRWKVKNCEETLFYICKKAGHVLSDTESGCQKGWERHGGFCYKIDTVLRTFDHASSGYHCPPALVTITNRFEQAFITSLISSVVKTKNSYFWIALQDQNDTGEYTWKTAWGQKSEPVQYTHWNARQPRYSGGCVVMRGRSPPGRWEVKDCRHFKAMSLCKQPVGKQEKTEQEERWPFHPCYLDWESEPGLASCFKVFHSEKVLMKRTWREAEAFCEEFGAHLASFAHIEEENFVNELLHSKFNRTEERQFWIGFNKRNPLNAGSWEWSDGTPVVSSFLDNTYFGEDARNCAVYKANKTLLPLHCSSKREWICKIPRDVRPKIPPWYQYDAPWLFYQDAEYLFHTYAAEWPSFEFVCVWLRGDILTIHSAHEQEFIHSKIRALSKYGVNWWIGLREERANDEFRWNDGAPVIYQNWDKRREGSMSNQSQRCGFISSITGLWASEECSVSLPGICKRKKIWVIEKEKDTPKQHGTCPKGWLYFNYKCLLMKIPKDPSDWKNWTSAQDFCVEEGGTLVAIENEVEQAFITMNLFGQTTNVWIGLQNDNYEKWLNGKPLAYSNWSPFDVINIPSHNTTEVQKHIPLCALLSSNPNFHFTGKWYFEDCGKEGHGFVCEKMQDTSGHTVNTSDMYPVPDTLEYGNRTYKIINANMTWYTAIKTCLMHGAELASITDQYHQSFLTVILNRLGHAHWIGLFTADNGLNFDWSDGTKSSFTFWKDDESSILGDCVFADTSGRWSSTACESFLQGAICHVPSETKQFGHPELCSETSIPWIKFKSNCYSFSTVLDSMSFEAAHEFCKKEGSNLLTIKDEDENSFLLEELSAFGSSVQMIWLNAQFDGDSKTIKWFDGTPTDQSNWGIRKPEMDHVKPHLCIALRISEGVWQLSPCQEKKGFICKMEAGLHAVKEHSGKGPSHSMVPLAVALTLIVILALSTLSFCIYKHNRGIFSRLAPFGNPYYPTNNFSTVHLEENILISDLEKNDP

SEQ ID NO: 201 - protein, 785 aa, Canis familiaris
MSINLTIDIYYIYLLSNARSLCGKQRSKQLHFLCSPKHYWRISHLSLQRGFHGSKTRCKLTKSEAHSCSNHCHSPSTHGLHIGILKLSTSTPKGLTKVSIRMSRIKSTLNSVSKAVFGTQNEMISRLAQFKPSSRILRKVSDSGWLKQKSIKQAIKSLKKYSDKSVENNSFSGKQSYILGKDEDIGKQSLFRYTSSITTRFGESFYFLSNHINSYFKREARMSKKKENKHFQEKSELEDKKVEEEKASSPDPGILIDKLDSESSVYSVDKPASTSGTPEALPVSTKQSIANFLSRPTEGVQALVGGYIGGLVPKLKYDSKSQPEEQEEVIKAEQPVSKDKNVEEKKRLSLQREKIIARVSIDNRTRALVQALRRTTDPKLCINRVEELTFHLLEFPEGKGVAVKYNTYAVIGIKLRQIKDETLQAAVREALALIGYVDPVKGRGIRILTIDGGGTRGVVALQTLRKLVELTQKPVHQLFDYICGVSTGAILAFMLGLFHMPLDECEELYRKLGSDVFSQNVIVGTVKMSWSHAFYDSQTWENILKDRMGSSLMIETARNPSCPKVAAVSTIVNRGITPKAFVFRNYGHFPGINSHYLGGCQYKMWQAIRASSAAPGYFAEYALGNDLHQDGGLLLNNPSALAMHECKCLWPDVPLECIVSLGTGRYESDVRNSVTSTSLKTKLSNVINSATDTEEVHVMLDGLLPPDTYFRFNPVMCENIPLDESRNEKLNQLQLEGLKYIERNEEKMKKLAKILSQEKTTLQKINDWIKLKTDMYEGLPFFSKL

SEQ ID NO: 202 - protein, 722 aa, Canis familiaris
MSINLTIDIYYIYLLSNARSLCGKQRSKQLHFLCSPKHYWRISHLSLQRGFHGSKTRCKLTKSEAHSCSNHCHSPSTHGLHIGILKLSTSTPKGLTKVSIRMSRIKSTLNSVSKAVFGTQNEMISRLAQFKPSSRILRKVSDSGWLKQKSIKQAIKSLKKYSDKSVENNSFSGKQSYILGKDEDIGKQSLFRYTSSITTRFGESFYFLSNHINSYFKREARMSKKKENKHFQEKSELEDKKVEEEKASSPDPGILIDKLDSESSVYSVDKPASTSGTPEALPVSTKQSIANFLSRPTEGVQALVGGYIGGLVPKLKYDSKSQPEEQEEVIKAEQPVSKDKNVEEKKRLSLQREKIIARVSIDNRTRALVQALRRTTDPKLCINRVEELTFHLLEFPEGKGVAVKEKIIPYLLRLRQIKDETLQAAVREALALIGYVDPVKGRGIRILTIDGGGTRGVVALQTLRKLVELTQKPVHQLFDYICGVSTGAILAFMLGLFHMPLDECEELYRKLGSDVFSQNVIVGTVKMSWSHAFYDSQTWENILKDRMGSSLMIETARNPSCPKVAADGGLLLNNPSALAMHECKCLWPDVPLECIVSLGTGRYESDVRNSVTSTSLKTKLSNVINSATDTEEVHVMLDGLLPPDTYFRFNPVMCENIPLDESRNEKLNQLQLEGLKYIERNEEKMKKLAKILSQEKTTLQKINDWIKLKTDMYEGLPFFSKL

SEQ ID NO: 203 - protein, 784 aa, Canis familiaris
MSINLTIDIYYIYLLSNARSLCGKQRSKQLHFLCSPKHYWRISHLSLQRGFHGSKTRCKLTKSEAHSCSNHCHSPSTHGLHIGILKLSTSTPKGLTKVSIRMSRIKSTLNSVSKAVFGTQNEMISRLAQFKPSSRILRKVSDSGWLKQKSIKQAIKSLKKYSDKSVENNSFSGKQSYILGKDEDIGKQSLFRYTSSITTRFGESFYFLSNHINSYFKREARMSKKKENKHFQEKSELEDKKVEEEKASSPDPGILIDKLDSESSVYSVDKPASTSGTPEALPVSTKQSIANFLSRPTEGVQALVGGYIGGLVPKLKYDSKSQPEEQEEVIKAEQPVSKDKNVEEKKRLSLQREKIIARVSIDNRTRALVQALRRTTDPKLCINRVEELTFHLLEFPEGKGVAVKEKIIPYLLRLRQIKDETLQAAVREALALIGYVDPVKGRGIRILTIDGGGTRGVVALQTLRKLVELTQKPVHQLFDYICGVSTGAILAFMLGLFHMPLDECEELYRKLGSDVFSQNVIVGTVKMSWSHAFYDSQTWENILKDRMGSSLMIETARNPSCPKVAAVSTIVNRGITPKAFVFRNYGHFPGINSHYLGGCQYKMWQAIRASSAAPGYFAEYALGNDLHQDGGLLLNNPSALAMHECKCLWPDVPLECIVSLGTGRYESDVRNSVTSTSLKTKLSNVINSATDTEEVHVMLDGLLPPDTYFRFNPVMCENIPLDESRNEKLNQLQLEGLKYIERNEEKMKKLAKILSQEKTTLQKINDWIKLKTDMYEGLPFFSKL

SEQ ID NO: 204 - protein, 683 aa, Canis familiaris
MSRIKSTLNSVSKAVFGTQNEMISRLAQFKPSSRILRKVSDSGWLKQKSIKQAIKSLKKYSDKSVENNSFSGKQSYILGKDEDIGKQSLFRYTSSITTRFGESFYFLSNHINSYFKREARMSKKKENKHFQEKSELEDKKVEEEKASSPDPGILIDKLDSESSVYSVDKPASTSGTPEALPVSTKQSIANFLSRPTEGVQALVGGYIGGLVPKLKYDSKSQPEEQEEVIKAEQPVSKDKNVEEKKRLSLQREKIIARVSIDNRTRALVQALRRTTDPKLCINRVEELTFHLLEFPEGKGVAVKEKIIPYLLRLRQIKDETLQAAVREALALIGYVDPVKGRGIRILTIDGGGTRGVVALQTLRKLVELTQKPVHQLFDYICGVSTGAILAFMLGLFHMPLDECEELYRKLGSDVFSQNVIVGTVKMSWSHAFYDSQTWENILKDRMGSSLMIETARNPSCPKVAAVSTIVNRGITPKAFVFRNYGHFPGINSHYLGGCQYKMWQAIRASSAAPGYFAEYALGNDLHQDGGLLLNNPSALAMHECKCLWPDVPLECIVSLGTGRYESDVRNSVTSTSLKTKLSNVINSATDTEEVHVMLDGLLPPDTYFRFNPVMCENIPLDESRNEKLNQLQLEGLKYIERNEEKMKKLAKILSQEKTTLQKINDWIKLKTDMYEGLPFFSKL

SEQ ID NO: 205 - protein, 806 aa, Canis familiaris
MQFFGRLVNTLSSVTNLFSNPFRVKEVAVADYTSSARVRDEGQLILFQNIPNRTWDCILVNPRNSQSGFRLFQLETEADALVNFQQYSSQLPPFYESSKHVLHTEVLQQLTDLIRSHPSWSAAHLAVELGIRECFHHSRIISCANNRENEEGCTPLHLACRKGDGEILVELVQYCHAQMDVTDNNGETAFHYAVQGDNSQVLQLLGKNASAGLNRVNNQGQTPLHLACQMGKQEMVRVLLLCNARCNIMGPTGYPIHTAMKFCHKGCAEMIISMDSNQIHSKDPRYGASPLHWAKNAEMARMLLKRGCDVNSTSCVGNTALHVAVMRNRFDCVMVLLTYGANADARGEHGNTPLHLAMSKDNVEMIKALIVFGAEVDTPNDFGETPASIASKISKLVTRKTLLTLLRTVGADYRLPLTHGAPSEQCSTTTHQSSSLERSQPPPISLNNLELQDIVQISRSRKPAFILSSMRDEKRTHDHLLCLDGGGVKGLVIIQLLIAIEKASGVATKDLFDWVAGTSTGGILALAILHSKSMAYMRGVYFRMKDEVFRGSRPYESGPLEEFLKREFGEHTKMTDVKKPKVMLTGTLSDRQPAELHLFRNYEAPESVREPRFSQNINLKPPTQPSDQLVWRAARSSGAAPTYFRPNGRFLDGGLLANNPTLDAMTEIHEYNQDLIRKGQGNKVKKLSIVVSLGTGRSPQVPVTCVDVFRPSNPWELAKTVFGAKELGKMVVDCCTDPDGRAVDRARAWCEMVGIQYFRLNPQLGTDIMLDEVSDTVLVNALWETEVYIYEHREQFQKLIQLLLSP

SEQ ID NO: 206 - protein, 836 aa, Canis familiaris
MGDHARLTRDSIFFQTEGAGGGASSPAPQKMQFFGRLVNTLSSVTNLFSNPFRVKEVAVADYTSSARVRDEGQLILFQNIPNRTWDCILVNPRNSQSGFRLFQLETEADALVNFQQYSSQLPPFYESSKHVLHTEVLQQLTDLIRSHPSWSAAHLAVELGIRECFHHSRIISCANNRENEEGCTPLHLACRKGDGEILVELVQYCHAQMDVTDNNGETAFHYAVQGDNSQVLQLLGKNASAGLNRVNNQGQTPLHLACQMGKQEMVRVLLLCNARCNIMGPTGYPIHTAMKFCHKGCAEMIISMDSNQIHSKDPRYGASPLHWAKNAEMARMLLKRGCDVNSTSCVGNTALHVAVMRNRFDCVMVLLTYGANADARGEHGNTPLHLAMSKDNVEMIKALIVFGAEVDTPNDFGETPASIASKISKLVTRKTLLTLLRTVGADYRLPLTHGAPSEQCSTTTHQSSSLERSQPPPISLNNLELQDIVQISRSRKPAFILSSMRDEKRTHDHLLCLDGGGVKGLVIIQLLIAIEKASGVATKDLFDWVAGTSTGGILALAILHSKSMAYMRGVYFRMKDEVFRGSRPYESGPLEEFLKREFGEHTKMTDVKKPKVMLTGTLSDRQPAELHLFRNYEAPESVREPRFSQNINLKPPTQPSDQLVWRAARSSGAAPTYFRPNGRFLDGGLLANNPTLDAMTEIHEYNQDLIRKGQGNKVKKLSIVVSLGTGRSPQVPVTCVDVFRPSNPWELAKTVFGAKELGKMVVDCCTDPDGRAVDRARAWCEMVGIQYFRLNPQLGTDIMLDEVSDTVLVNALWETEVYIYEHREQFQKLIQLLLSP

SEQ ID NO: 207 - protein, 782 aa, Homo sapiens; identical to SEQ ID NO: 110

SEQ ID NO: 208 - protein, 810 aa, Homo sapiens
MQAGWSGRHCRERASRRCSPSDCGLHPDCLLLQGLHDYLKFNNNARSVCGKQRSKQLYFLFSPKHYWRISHISLQRGFHTNIIRCKWTKSEAHSCSKHCYSPSNHGLHIGILKLSTSAPKGLTKVNICMSRIKSTLNSVSKAVFGNQNEMISRLAQFKPSSQILRKVSDSGWLKQKNIKQAIKSLKKYSDKSAEKSPFPEEKSHIIDKEEDIGKRSLFHYTSSITTKFGDSFYFLSNHINSYFKRKEKMSQQKENEHFRDKSELEDKKVEEGKLRSPDPGILAYKPGSESVHTVDKPTSPSAIPDVLQVSTKQSIANFLSRPTEGVQALVGGYIGGLVPKLKYDSKSQSEEQEEPAKTDQAVSKDRNAEEKKRLSLQREKIIARVSIDNRTRALVQALRRTTDPKLCITRVEELTFHLLEFPEGKGVAVKERIIPYLLRLRQIKDETLQAAVREILALIGYVDPVKGRGIRILSIDGGGTRGVVALQTLRKLVELTQKPVHQLFDYICGVSTGAILAFMLGLFHMPLDECEELYRKLGSDVFSQNVIVGTVKMSWSHAFYDSQTWENILKDRMGSALMIETARNPTCPKVAAVSTIVNRGITPKAFVFRNYGHFPGINSHYLGGCQYKMWQAIRASSAAPGYFAEYALGNDLHQDGGLLLNNPSALAMHECKCLWPDVPLECIVSLGTGRYESDVRNTVTYTSLKTKLSNVINSATDTEEVHIMLDGLLPPDTYFRFNPVMCENIPLDESRNEKLDQLQLEGLKYIERNEQKMKKVAKILSQEKTTLQKINDWIKLKTDMYEGLPFFSKL

SEQ ID NO: 209 - protein, 380 aa, Homo sapiens
ERIIPYLLRLRQIKDETLQAAVREILALIGYVDPVKGRGIRILSIDGGGTRGVVALQTLRKLVELTQKPVHQLFDYICGVSTGAILAFMLGLFHMPLDECEELYRKLGSDVFSQNVIVGTVKMSWSHAFYDSQTWENILKDRMGSALMIETARNPTCPKVAAVSTIVNRGITPKAFVFRNYGHFPGINSHYLGGCQYKMWQAIRASSAAPGYFAEYALGNDLHQDGGLLLNNPSALAMHECKCLWPDVPLECIVSLGTGRYESDVRNTVTYTSLKTKLSNVINSATDTEEVHIMLDGLLPPDTYFRFNPVMCENIPLDESRNEKLDQLQLEGLKYIERNEQKMKKVAKILSQEKTTLQKINDWIKLKTDMYEGLPFFSKL

SEQ ID NO: 210 - protein, 806 aa, Homo sapiens; identical to SEQ ID NO: 22

SEQ ID NO: 211 - protein, 782 aa, Homo sapiens; identical to SEQ ID NO: 110

SEQ ID NO: 212 - protein, 782 aa, Homo sapiens; identical to SEQ ID NO: 110

SEQ ID NO: 213 - protein, 1458 aa, Oryctolagus cuniculus; identical to SEQ ID NO: 13

SEQ ID NO: 214 - protein, 412 aa, Mus musculus; identical to SEQ ID NO: 116

SEQ ID NO: 215 - protein, 485 aa, Mus musculus
MIMLLMVGMLMAPCVGAHALDTPNPQELPPGLSKNINITFFNGVFKNVESVAEIFDCLGSHFTWLQAVFTNFPLLLQFVNSMRCVTGLCPRDFEDYGCACRFEMEGMPVDESDICCFQHRRCYEEAVEMDCLQDPAKLSADVDCTNKQITCESEDPCERLLCTCDKAAVECLAQSGINSSLNFLDASFCLPQTPETTSGKAATLLPRGIPEKPTDTSQIALSGEVAGEVRADTLTTLSRTKSVQDLQDTQASRTTSSPGSAEIIALAKGTTHSAGIKPLRLGVSSVDNGSQEAAGKACDRLAFVHLGDGDSMTAMLQLGEMLFCLTSHCPEEFETYGCYCGREGRGEPRDTLDRCCLSHHCCLEQMRQVGCLHGRRSQSSVVCEDHMAKCVGQSLCEKLLCACDQMAAECMASAFFNQSLKSPDGAECQGEPVSCEDGMLQGTLASSVDSSSEENSEEAPPQMERLRRFLEKPPGPLGARPLGGK

SEQ ID NO: 216 - protein, 346 aa, Homo sapiens; identical to SEQ ID NO: 96

SEQ ID NO: 217 - protein, 195 aa, Oryctolagus cuniculus; identical to SEQ ID NO: 89

SEQ ID NO: 218 - protein, 465 aa, Oryctolagus cuniculus
MVSSQKLEKPIEMGSSEPLPIADGDRRRKKKRRGRATDSLPGKFEDMYKLTSELLGEGAYAKVQGAVSLQNGKEYAVKIIEKQAGHSRSRVFREVETLYQCQGNKNILELIEFFEDDTRFYLVFEKLQGGSILAHIQKQKHFNEREASRVVRDVAAALDFLHTKDKVSLCHLGWSAMAPSGLTAAPTSLGSSDPPTSASQVAGTTGIAHRDLKPENILCESPEKVSPVKICDFDLGSGMKLNNSCTPITTPELTTPCGSAEYMAPEVVEVFTDQATFYDKRCDLWSLGVVLYIMLSGYPPFVGHCGADCGWDRGEVCRVCQNKLFESIQEGKYEFPDKDWAHISSEAKDLISKLLVRDAKQRLSAAQVLQHPWVQGQAPEKGLPTPQVLQRNSSTMDLTLFAAEAIALNRQLSQHEENELAEEPEALADGLCSMKLSPPCKSRLARRRALAQAGRGEDRSPPTAL

SEQ ID NO: 219 - protein, 229 aa, Mus musculus
MSQGDSNPAAIPHAAEDIQGDDRWMSQHNRFVLDCKDKEPDVLFVGDSMVQLMQQYEIWRELFSPLHALNFGIGGDTTRHVLWRLKNGELENIKPKVIVVWVGTNNHENTAEEVAGGIEAIVQLINTRQPQAKIIVLGLLPRGEKPNPLRQKNAKVNQLLKVSLPKLANVQLLDIDGGFVHSDGAISCHDMFDFLHLTGGGYAKICKPLHELIMQLLEETPEEKQTTIA

SEQ ID NO: 220 - protein, 589 aa, Rattus norvegicus
MATTVTCTRFTDEYQLYEDIGKGAFSVVRRCVKLCTGHEYAAKIINTKKLSARDHQKLEREARICRLLKHSNIVRLHDSISEEGFHYLVFDLVTGGELFEDIVAREYYSEADASHCIQQILEAVLHCHQMGVVHRDLKPENLLLASKCKGAAVKLADFGLAIEVQGDQQAWFGFAGTPGYLSPEVLRKEAYGKPVDIWACGVILYILLVGYPPFWDEDQHKLYQQIKAGAYDFPSPEWDTVTPEAKNLINQMLTINPAKRITAHEALKHPWVCQRSTVASMMHRQETVECLKKFNARRKLKGAILTTMLATRNFSAAKSLLNKKADGVKPQTNSTKNSSAITSPKGSLPPAALESSDSTNTTIEDEDAKAPRISDILNSVRRGCGTPEAEGPLSVGPPPCLSPGLLGPLPTPSPRISDILNSVRRGSGTPEAEGLPPVGPPPCPSPTLPGPLPTPSRKQEIIKTTEQLIEAVNNGDFEAYAKICDPGLTSFEPEALGNLVEGMDFHRFYFENLLAKNSKPIHTTILNPHVHVIGEDAACIAYIRLTQYIDGQGRPRTSQSEETRVWHRRDGKWQNVHFHCSGAPVAPLQ

SEQ ID NO: 221 - protein, 503 aa, Rattus norvegicus
MATTVTCTRFTDEYQLYEDIGKGAFSVVRRCVKLCTGHEYAAKIINTKKLSARDHQKLEREARICRLLKHSNIVRLHDSISEEGFHYLVFDLVTGGELFEDIVAREYYSEADASHCIQQILEAVLHCHQMGVVHRDLKPENLLLASKCKGAAVKLADFGLAIEVQGDQQAWFGFAGTPGYLSPEVLRKEAYGKPVDIWACGVILYILLVGYPPFWDEDQHKLYQQIKAGAYDFPSPEWDTVTPEAKNLINQMLTINPAKRITAHEALKHPWVCQRSTVASMMHRQETVECLKKFNARRKLKGAILTTMLATRNFSAAKSLLNKKADGVKPQTNSTKNSSAITSPKGSLPPAALESSDSTNTTIEDEDAKARKQEIIKTTEQLIEAVNNGDFEAYAKICDPGLTSFEPEALGNLVEGMDFHRFYFENLLAKNSKPIHTTILNPHVHVIGEDAACIAYIRLTQYIDGQGRPRTSQSEETRVWHRRDGKWQNVHFHCSGAPVAPLQ

SEQ ID NO: 222 - protein, 542 aa, Rattus norvegicus
MATTVTCTRFTDEYQLYEDIGKGAFSVVRRCVKLCTGHEYAAKIINTKKLSARDHQKLEREARICRLLKHSNIVRLHDSISEEGFHYLVFDLVTGGELFEDIVAREYYSEADASHCIQQILEAVLHCHQMGVVHRDLKPENLLLASKCKGAAVKLADFGLAIEVQGDQQAWFGFAGTPGYLSPEVLRKEAYGKPVDIWACGVILYILLVGYPPFWDEDQHKLYQQIKAGAYDFPSPEWDTVTPEAKNLINQMLTINPAKRITAHEALKHPWVCQRSTVASMMHRQETVECLKKFNARRKLKGAILTTMLATRNFSVGRQTTAPATMSTAASGTTMGLVEQAKSLLNKKADGVKPQTNSTKNSSAITSPKGSLPPAALEPQTTVIHNPVDGIKESSDSTNTTIEDEDAKARKQEIIKTTEQLIEAVNNGDFEAYAKICDPGLTSFEPEALGNLVEGMDFHRFYFENLLAKNSKPIHTTILNPHVHVIGEDAACIAYIRLTQYIDGQGRPRTSQSEETRVWHRRDGKWQNVHFHCSGAPVAPLQ

SEQ ID NO: 223 - protein, 347 aa, Homo sapiens
MVSSQKLEKPIEMGSSEPLPIADGDRRRKKKRRGRATDSLPGKFEDMYKLTSELLGEGAYAKVQGAVSLQNGKEYAVKIIEKQAGHSRSRVFREVETLYQCQGNKNILELIEFFEDDTRFYLVFEKLQGGSILAHIQKQKHFNEREASRVVRDVAAALDFLHTKGIAHRDLKPENILCESPEKVSPVKICDFDLGSGMKLNNSCTPITTPELTTPCGSAEYMAPEVVEVFTDQATFYDKRCDLWSLGVVLYIMLSGYPPFVGHCGADCGWDRGEVCRVCQNKLFESIQEGKYEFPDKDWAHISSEAKDLISKLLVRDAKQRLSAAQVLQHPWVQGEQQHNGPDALRS

SEQ ID NO: 224 - protein, 232 aa, Mus musculus
MSGEGENPASKPTPVQDVQGDGRWMSLHHRFVADSKDKEPEVVFIGDSLVQLMHQCEIWRELFSPLHALNFGIGGDSTQHVLWRLENGELEHIRPKIVVVWVGTNNHSHTAEQVTGGIKAIVQLVNKLQPQARVVVLGLLPRGQHPNPLREKNRQVNELVRAALAGYPRAHFLDADPGFVHSDGTISHHDMYDYLHLSRLGYTPVCRALHSLLLRLLAQDQGQGIPLPETAS

SEQ ID NO: 225 - protein, 231 aa, Pongo abelii
MSGEENPASKPTPVQDVQGDGRWMSLHHRFVADSKDKEPEVVFIGDSLVQLMHQCEIWRELFSPLHALNFGIGGDGTQHVLWRLENGELEHIRPKIVVVWVGTNNHGHTAEQVTGGIKAIVQLVNERQPQARVVVLDLLPRGQHPNPLREKNQRVNELVRAALAGHPRAHFLDADPGFVHSDGTISHHDMYDYLHLSRLGYAPVCRALHSLLLRLLAQDQGQGAPLLDPAP

SEQ ID NO: 226 - protein, 229 aa, Pongo abelii
MSQGDSNPAAIPHAAEDIQGDDRWMSQHNRFVLDCKDKEPDVLFVGDSMVQLMQQYEIWRELFSPLHALNFGIGGDTTRHVLWRLKNGELENIKPKVIVVWVGTNNHENTAEEVAGGIEAIVQLINTRQPQAKIIVLGLLPRGEKPNPLRQKNAKVNQLLKVSLPKLANVQLLDTDGGFVHSDGAISCHDMFDFLHLTGGGYAKICKPLHELIMQLLEETPEEKQTTIA

SEQ ID NO: 227 - protein, 229 aa, Homo sapiens; identical to SEQ ID NO: 226

SEQ ID NO: 228 - protein, 231 aa, Homo sapiens
MSGEENPASKPTPVQDVQGDGRWMSLHHRFVADSKDKEPEVVFIGDSLVQLMHQCEIWRELFSPLHALNFGIGGDGTQHVLWRLENGELEHIRPKIVVVWVGTNNHGHTAEQVTGGIKAIVQLVNERQPQARVVVLGLLPRGQHPNPLREKNRQVNELVRAALAGHPRAHFLDADPGFVHSDGTISHHDMYDYLHLSRLGYTPVCRALHSLLLRLLAQDQGQGAPLLEPAP

SEQ ID NO: 229 - protein, 229 aa, Bos taurus; identical to SEQ ID NO: 226

SEQ ID NO: 230 - protein, 232 aa, Rattus norvegicus
MSGEGENPASKPTPVQDVQGDGRWMSLHHRFVADSKDKEPEVVFIGDSLVQLMHQCEIWRELFSPLHALNFGIGGDSTQHVLWRLENGELEHIRPKIVVVWVGTNNHSHTAEQVTGGIKAIVQLVNKLQPQARVVVLGLLPRGQHPNPLREKNRQVNELVRAALAGYPRAHFLDADPGFVHSDGTISHHDMYDYLHLSRLGYTPVCRALHSLLLRLLAQDQGQGIPLPETAP

SEQ ID NO: 231 - protein, 229 aa, Rattus norvegicus; identical to SEQ ID NO: 219

SEQ ID NO: 232 - protein, 232 aa, Bos taurus
MSGDENPASKPTPVQDVQGDGRWMSLHHRFVADSKDKEPEVVFIGDSLVQLMHQCEIWRELFSPLHALNFGIGGDSTQHVLWRLENGELEHIRPKIVVVWVGTNNHGHTAEQVTGGIKAIVQLVNERQPQARVVVLGLLPRGQHPNPLREKNRRVNELVRAALAGHPRAHFLDADPGFVHSDGTISHHDMYDYLHLSRLGYTPVCRALHSLLLRLLTQDQGQGGAPLPEPSP

SEQ ID NO: 233 - protein, 224 aa, Rattus norvegicus; identical to SEQ ID NO: 101

SEQ ID NO: 234 - protein, 321 aa, Homo sapiens
MAMATKGGTVKAASGFNAMEDAQTLRKAMKGLGTDEDAIISVLAYRNTAQRQEIRTAYKSTIGRDLIDDLKSELSGNFEQVIVGMMTPTVLYDVQELRRAMKGAGTDEGCLIEILASRTPEEIRRISQTYQQQYGRSLEDDIRSDTSFMFQRVLVSLSAGGRDEGNYLDDALVRQDAQDLYEAGEKKWGTDEVKFLTVLCSRNRNHLLHVFDEYKRISQKDIEQSIKSETSGSFEDALLAIVKCMRNKSAYFAEKLYKSMKGLGTDDNTLIRVMVSRAEIDMLDIRAHFKRLYGKSLYSFIKGDTSGDYRKVLLVLCGGDD

SEQ ID NO: 235 - protein, 384 aa, Mus musculus
MAQAARLSWVLVSSRCALTEGLLTRPWQPLSAQSRAGFTRVAAGSRGAAVRKGSPRLLGAAALALGGALGLYHTVRWHQRSQDLRAERSAAQLPLSNSLQLTLYQYKTCPFCSKVRAFLDFHSLPYQVVEVNPVRRTEIKFSSYRKVPILVAQEGDSLQQLNDSSVIISALKTYLVSGQPLEEVITYYPPMKAMNDQGKEVTEFCNKYWPMLDEKEAQQMYGGKEARTEEMKWRQWADDWLVHLISPNVYRTPAEALASFDYIVREGKFGAVEAAMAKYVGAAAMYLISKRLKSRHHLQDDVRVDLYEAANKWVTAVGKDRPFMGGQKPNLADLAVYGVLRVMEGLEAFDDLMRHSHIQPWYLRMERAIEEAPSVHHVNPSCKD

SEQ ID NO: 236 - protein, 195 aa, Mus musculus
MKLLCGFFLLWLGLVGNLAQSDPSPKEEESYSDWGLRQLRGSFESVNSYVDSFMELLGGKNGVCQYRCRYGKAPMPRPGYKAQEPNGCSSYFLGIKVPGSMDLGIPAMTKCCNQLDVCYDTCGANKYRCDAKFRWCLHSICSDLKRTLGFVSNVEAACDSLADTVFNTVWTLGCRPFMNSQRAACICAEEEKEEL

SEQ ID NO: 237 - protein, 504 aa, Homo sapiens; identical to SEQ ID NO: 84

SEQ ID NO: 238 - protein, 248 aa, Rattus norvegicus
MSLCSLAFTLFLTVVAGIKCNVTDVCAGSPGIPGAPGNHGLPGRDGRDGVKGDPGPPGPMGPPGGMPGLPGRDGLPGGPGAPGGRGDKGEPGERGLPGFPAYLDEELQTELYEIKHQILQTMGVLSLQGSMLSVGDKVFSTNGQSVNFDTIKEMCTRAGGNIAVPRTPEENEAIASIAKKYNNYVYLGMIEDQTPGDFHYLDGASVNYTNWYPGEPRGQGKEKCVEMYTDGTWNDRGCLQYRLAVCEF

SEQ ID NO: 239 - protein, 253 aa, Homo sapiens
MKHINLSFAACGFLGIYHLGAASALCRHGKKLVKDVKAFAGASAGSLVASVLLTAPEKIEECNQFTYKFAEEIRRQSFGAVTPGYDFMARLRSGMESILPPSAHELAQNRLHVSITNAKTRENHLVSTFSSREDLIKVLLASSFVPIYAGLKLVEYKGQKWVDGGLTNALPILPVGRTVTISPFSGRLDISPQDKGQLDLYVNIAKQDIMLSLANLVRLNQALFPPSKRKMESLYQCGFDDTVKFLLKENWFE

SEQ ID NO: 240 - protein, 178 aa, Homo sapiens
MSGGKYVDSEGHLYTVPIREQGNIYKPNNKAMADELSEKQVYDAHTKEIDLVNRDPKHLNDDVVKIDFEDVIAEPEGTHSFDGIWKASFTTFTVTKYWFYRLLSALFGIPMALIWGIYFAILSFLHIWAVVPCIKSFLIEIQCISRVYSIYVHTVCDPLFEAVGKIFSNVRINLQKEI

SEQ ID NO: 241 - protein, 224 aa, Homo sapiens; identical to SEQ ID NO: 71

SEQ ID NO: 242 - protein, 320 aa, Homo sapiens
MAQVLRGTVTDFPGFDERADAETLRKAMKGLGTDEESILTLLTSRSNAQRQEISAAFKTLFGRDLLDDLKSELTGKFEKLIVALMKPSRLYDAYELKHALKGAGTNEKVLTEIIASRTPEELRAIKQVYEEEYGSSLEDDVVGDTSGYYQRMLVVLLQANRDPDAGIDEAQVEQDAQALFQAGELKWGTDEEKFITIFGTRSVSHLRKVFDKYMTISGFQIEETIDRETSGNLEQLLLAVVKSIRSIPAYLAETLYYAMKGAGTDDHTLIRVMVSRSEIDLFNIRKEFRKNFATSLYSMIKGDTSGDYKKALLLLCGEDD

SEQ ID NO: 243 - protein, 1365 aa, Pongo abelii
MLLSPSLLLPLLLLLGAPRGCAEGVAAALTPERLLEWQDKGIFVIQSESLKKCIQAGKSVLTLENCKQANKHMLWKWVSNHGLFNIGGSGCLGLNFSAPEQPLSLYECDSTLVSLRWRCDRKMITGPLQYSVQVAHDNTVVASRKYFHKWISYGSGGGDICEYLHKDLHTIKGNAHGMPCMFPFQYNHQWHHECTREGREDDLLWCATTSRYERDEKWGFCPDPTSAEVGCDTIWEKDLNSHICYQFNLLSSLSWSEAHSSCQMQGGALLSITDETEENFIREHMSSKTVEVWMGLNQLDEHAGWQWSDGTPLNYLNWSPEVNFEPFVEDHCGTFSSFIPSAWRSRDCASTLPYVCKKYLNHIDHEIVEKDAWKYYATHCEPGWNPYNRNCYKLQKEEKTWHEALRSCQADNSALIDITSLAEVEFLVTLLGDENASETWIGLSSNKIPVSFEWSNDSSVIFTNWHTLEPQIFPNRSQLCVSAEQSEGHWKVKNCEETLFYVCKKAGHVLSDAESGCQEGWERHGGFCYKIDTVLRSFDQASSGYYCPPALVTITNRFEQAFITSLIGSVVKMKDSYFWIALQDQNDTGEYTWKPAGQKPEPVQYTHWNAHQPRYSGGCVAMRGRHPPGRWEVKHCRHFKAMSLCKQPVENQEKAEYEERWPFHPCYLDWESEPGLASCFKVFHSEKVLMKRTWREAEAFCEEFGAHLASFAHIEEENFVNELLYSKFNWTEERQFWIGFNKRNPLNAGSWEWSDRIPVVSSFLDNNYFGEDARNCAVYKANKTLLPLHCGSKREWICKIPRDVKPKIPFWYQYDVPWLFYQDAEYLFHTFASEWLNFEFVCSWLHSDLLTIHSAHEQEFIHSKIKALSKYGASWWIGLQEERANDEFRWRDGTPVIYQNWDTGRERPVNNQSQRCGFISSITGLWGSEECSVSMPSICKRKKVLLIEKKKDTPKQHGTCPKGWLYFNYKCLLLNIPKDPNSWKNWMHAQHFCAEEGGTLVAIESEVEQAFITMNLFGQTTNVWIGLQNDDYETWLNGKPVVYSNWSPFDIINIPSHNTTDVQKHIPLCALLSSNPNFHFTGKWYFEDCGKEGYGFVCEKMQDTSGHGVNTSDMYPMPNTLEYGNRTYKIINANMTWYAAIKTCLMHGTQLVSITDQYHQSFLTVVLNRLGYAHWIGLFTTDNGLNFDWSDGTKSSFTFWKDEESSLLGDCVFADTNGLWHSTACESFLQGAICHVPPETRQSEHPELCSETSIPWIKFKSNCYSFSTVLDRMSFEAAHEFCKKEGSNLLTIKDEAENAFLLEELFAFGSSVQMVWLNAQFDGNNETIKWFDGTPTDQSNWGIRKPDTDYFKPHHCVALRIPEGL

SEQ ID NO: 244 - protein, 481 aa, Homo sapiens
MYDAERGWSLSFAGCGFLGFYHVGATRCLSEHAPHLLRDARMLFGASAGALHCVGVLSGIPLEQTLQVLSDLVRKARSRNIGIFHPSFNLSKFLRQGLCKCLPANVHQLISGKIGISLTRVSDGENVLVSDFRSKDEVVDALVCSCFIPFYSGLIPPSFRGVRYVDGGVSDNVPFIDAKTTITVSPFYGEYDICPKVKSTNFLHVDITKLSLRLCTGNLYLLSRAFVPPDLKVLGEICLRGYLDAFRFLEEKGICNRPQPGLKSSSEGMDPEVAMPSWANMSLDSSPESAALAVRLEGDELLDHLRLSILPWDESILDTLSPRLATALSEEMKDKGGYMSKICNLLPIRIMSYVMLPCTLPVESAIAIVQRLVTWLPDMPDDVLWLQWVTSQVFTRVLMCLLPASRSQMPVSSQQASPCTPEQDWPCWTPCSPKGCPAETKAEATPRSILRSSLNFFLGNKVPAGAEGLSTFPSFSLEKSL

SEQ ID NO: 245 - protein, 473 aa, Homo sapiens
MSEESDMDKAIKETSILEEYSINWTQKLGAGISGPVRVCVKKSTQERFALKILLDRPKARNEVRLHMMCATHPNIVQIIEVFANSVQFPHESSPRARLLIVMEMMEGGELFHRISQHRHFTEKQASQVTKQIALALRHCHLLNIAHRDLKPENLLFKDNSLDAPVKLCDFGFAKIDQGDLMTPQFTPYYVAPQVLEAQRRHQKEKSGIIPTSPTPYTYNKSCDLWSLGVIIYVMLCGYPPFYSKHHSRTIPKDMRRKIMTGSFEFPEEEWSQISEMAKDVVRKLLKVKPEERLTIEGVLDHPWLNSTEALDNVLPSAQLMMDKAVVAGIQQAHAEQLANMRIQDLKVSLKPLHSVNNPILRKRKLLGTKPKDSVYIHDHENGAEDSNVALEKLRDVIAQCILPQAGKGENEDEKLNEVMQEAWKYNRECKLLRDTLQSFSWNGRGFTDKVDRLKLAEIVKQVIEEQTTSHESQ

SEQ ID NO: 246 - protein, 471 aa, Homo sapiens
MSEESDMDKAIKETSILEEYSINWTQKLGAGISGPVRVCVKKSTQERFALKILLDRPKARNEVRLHMMCATHPNIVQIIEVFANSVQFPHESSPRARLLIVMEMMEGGELFHRISQHRHFTEKQASQVTKQIALALRHCHLLNIAHRDLKPENLLFKDNSLDAPVKLCDFGFAKIDQGDLMTPQFTPYYVAPQVLEAQRRHQKEKSGIIPTSPTPYTYNKSCDLWSLGVIIYVMLCGYPPFYSKHHSRTIPKDMRRKIMTGSFEFPEEEWSQISEMAKDVVRKLLKVKPEERLTIEGVLDHPWLNSTEALDNVLPSAQLMMDKAVVAGIQQAHAEQLANMRIQDLKVSLKPLHSVNNPILRKRKLLGTKPKDSVYIHDHENGAEDSNVALEKLRDVIAQCILPQAGENEDEKLNEVMQEAWKYNRECKLLRDTLQSFSWNGRGFTDKVDRLKLAEIVKQVIEEQTTSHESQ

SEQ ID NO: 247 - protein, 230 aa, Rattus norvegicus
MCGNNMSAPMPAVVPAARKATAAVIFLHGLGDTGHGWAEAFAGIKSSHIKYICPHAPVMPVTLNMSMMMPSWFDIIGLSPDSQEDESGIKQAAETVKALIDQEVKNGIPSNRIILGGFSQGGALSLYTALTTQQKLAGVTALSCWLPLRASFSQGPINSANRDISVLQCHGDCDPLVPLMFGSLTVERLKGLVNPANVTFKVYEGMMHSSCQQEMMDVKYFIDKLLPPID

SEQ ID NO: 248 - protein, 670 aa, Rattus norvegicus
MPSYTVTVATGSQWFAGTDDYIYLSLIGSAGCSEKHLLDKAFYNDFERGGRDSYDVTVDEELGEIYLVKIEKRKYRLHDDWYLKYITLKTPHDYIEFPCYRWITGEGEIVLRDGCAKLARDDQIHILKQHRRKELETRQKQYRWMEWNPGFPLSIDAKCHKDLPRDIQFDSEKGVDFVLNYSKAMENLFINRFMHMFQSSWHDFADFEKIFVKISNTISERVKNHWQEDLMFGYQFLNGCNPVLIKRCTELPKKLPVTTEMVECSLERQLSLEQEVQEGNIFIVDYELLDGIDANKTDPCTHQFLAAPICLLYKNLANKIVPIAIQLNQTPGEKNPIFLPTDSKYDWLLAKIWVRSSDFHIHQTITHLLRTHLVSEVFGIAMYRQLPAVHPLFKLLVAHVRFTIAINTKAREQLNCEYGLFDKANATGGGGHVQMVQRAVQDLTYSSLCFPEAIKARGMDNTEDIPYYFYRDDGLLVWEAIQSFTTEVVSIYYEDDQVVEEDQELQDFVKDVYVYGMRGRKASGFPKSIKSREKLSEYLTVVIFTASAQHAAVNFGQYDWCSWIPNAPPTMRAPPPTAKGVVTIEQIVDTLPDRGRSCWHLGAVWALSQFQENELFLGMYPEEHFIEKPVKEAMIRFRKNLEAIVSVIAERNKNKKLPYYYLSPDRFQTV

SEQ ID NO: 249 - protein, 481 aa, Homo sapiens; identical to SEQ ID NO: 244

SEQ ID NO: 250 - protein, 230 aa, Rattus norvegicus; identical to SEQ ID NO: 247

SEQ ID NO: 251 - protein, 266 aa, Macaca fascicularis
MSWSHAFYDSQAWENILRDRMGSALMIETARNPTCPKVAAVSTIVNRGITPKAFVFRNYGHFPGNNSHYLGGCQYKMWQAIRASSAAPGYFAEYALGNDLHQDGGLLLNNPSALAMHECKCLWPDVPLECIVSLGTGRYESDVRNTVTHTSLKTKLSNVINSATDTEEVHIMLDGLLPPDTYFRFNPVMCENIPLDESRNEKLDQLQLEGLKYIERNEQKMKKVAKILSQEKTTLQKINDWIKLKTDMYEGLPFFSNCDEYMHMAS

SEQ ID NO: 252 - protein, 803 aa, Mus musculus
MSINLTLDIYIYFLNNARSLCGKQRSKQLHFVCSKQYWRMNHVNVHREFHTSKKSCKWNRSEAHCSKHWHSPSNHGLHFGIVRLSTSAPKGLTKVSIHMSRIKSTLNSVSKAIFGSQNEMVTRLAQFKPSSRILRKVSDKGWLKQKNVKQAVESLKNYSDKSAGKNSLAEQKSYFADKEEDSGKHSLFHYTYGITTRFGESFSVLANHINSYFKSKGKMSQTKEDKQLQDKPDLEERKSSSPGPDTVADRPDSESPLEVKDKLSSPTQMPEAHPVSAKQSIANFLSRPTEGVQALVGGYIGGLVPKLKSDPKSPPEEQEVSAKTEQAVNKDKKAEEKKRVLLQQEKIIARVSIDNRTRALVQALRRTADPKLCITRVEELTFHLLEFPEGKGVAIKEKIIPYLLRLRQVKDETLQAAVREILALIGYVDPVKGRGIRILTIDGGGTRGVVALQTLRKLVELTQKPIHQLFDYICGVSTGAILAFMLGLFHMPLDECEELYRKLGSDVFTQNVIVGTVKMSWSHAFYDSNTWEKILKDRIGSALMIETARNPACPKVAAISTIVNRGQTPKAFVFRNYGHFPGTNSHYLGGCQYKMWQAIRASSAAPGYFAEYALGSDLHQDGGLLLNNPSALALHECKCIWPDTPLECIVSLGTGRYESDVRNTSTYTSLKTKLSNVISSATDTEEVHIMLDGLLPSDTYFRFNPVICENIPLDESRDEKLDQLQLEGMKYIERNDQKMKKVAKILSQEKTTLQKINDWIKLKSDMYEGLPFFSKLWVGYTCVLINEGHQKIHQFREERCDST

SEQ ID NO: 253 - protein, 91 aa, Equus caballus
MKLAITITLAILALCCSPASAEICQSFADIIQGLFLGTPASFEAAVEPFKPDADMKAATTQLKTLVDFLPKNTKDSILKLMDKIAKSPLCA

SEQ ID NO: 254 - protein, 73 aa, Equus caballus
ALCCSPASAGICQRFVGIVQALYLGTPASFEAAVEPFKPDADMKAAATQLKTLVDFLPKNAKDSILKLMDKIV

SEQ ID NO: 255 - protein, 73 aa, Equus caballus; identical to SEQ ID NO: 254

SEQ ID NO: 256 - protein, 73 aa, Equus caballus; identical to SEQ ID NO: 254

SEQ ID NO: 257 - protein, 73 aa, Equus caballus; identical to SEQ ID NO: 254

SEQ ID NO: 258 - protein, 195 aa, Mus musculus; identical to SEQ ID NO: 90

SEQ ID NO: 259 - protein, 195 aa, Homo sapiens; identical to SEQ ID NO: 89

SEQ ID NO: 260 - protein, 367 aa, Homo sapiens
MKSLVLLLCLAQLWGCHSAPHGPGLIYRQPNCDDPETEEAALVAIDYINQNLPWGYKHTLNQIDEVKVWPQQPSGELFEIEIDTLETTCHVLDPTPVARCSVRQLKEHAVEGDCDFQLLKLDGKFSVVYAKCDSSPDSAEDVRKVCQDCPLLAPLNDTRVVHAAKAALAAFNAQNNGSNFQLEEISRAQLVPLPPSTYVEFTVSGTDCVAKEATEAAKCNLLAEKQYGFCKATLSEKLGGAEVAVTCMVFQTQPVSSQPQPEGANEAVPTPVVDPDAPPSPPLGAPGLPPAGSPPDSHVLLAAPPGHQLHRAHYDLRHTFMGVVSLGSPSGEVSHPRKTRTVVQPSVGAAAGPVVPPCPGRIRHFKV

SEQ ID NO: 261 - protein, 327 aa, Homo sapiens
MAWWKAWIEQEGVTVKSSSHFNPDPDAETLYKAMKGIGTNEQAIIDVLTKRSNTQRQQIAKSFKAQFGKDLTETLKSELSGKFERLIVALMYPPYRYEAKELHDAMKGLGTKEGVIIEILASRTKNQLREIMKAYEEDYGSSLEEDIQADTSGYLERILVCLLQGSRDDVSSFVDPGLALQDAQDLYAAGEKIRGTDEMKFITILCTRSATHLLRVFEEYEKIANKSIEDSIKSETHGSLEEAMLTVVKCTQNLHSYFAERLYYAMKGAGTRDGTLIRNIVSRSEIDLNLIKCHFKKMYGKTLSSMIMEDTSGDYKNALLSLVGSDP

SEQ ID NO: 262 - protein, 229 aa, Homo sapiens; identical to SEQ ID NO: 226

SEQ ID NO: 263 - protein, 339 aa, Homo sapiens
MSTVHEILCKLSLEGDHSTPPSAYGSVKAYTNFDAERDALNIETAIKTKGVDEVTIVNILTNRSNAQRQDIAFAYQRRTKKELASALKSALSGHLETVILGLLKTPAQYDASELKASMKGLGTDEDSLIEIICSRTNQELQEINRVYKEMYKTDLEKDIISDTSGDFRKLMVALAKGRRAEDGSVIDYELIDQDARDLYDAGVKRKGTDVPKWISIMTERSVPHLQKVFDRYKSYSPYDMLESIRKEVKGDLENAFLNLVQCIQNKPLYFADRLYDSMKGKGTRDKVLIRIMVSRSEVDMLKIRSEFKRKYGKSLYYYIQQDTKGDYQKALLYLCGGDD

SEQ ID NO: 264 - protein, 51 aa, Cavia porcellus
HALDTPHFPQELTSALSKNICITFFSGMFKNVESVAEIFDSLGPSFKQDQA

SEQ ID NO: 265 - protein, 467 aa, Canis familiaris
MVSIWTIALFLLGAAKAKEVCYEQIGCFSDAEPWAGTAIRPLKVLPWSPERIGTRFLLYTNKNPNNFQTLLPSDPSTIEASNFQTDKKTRFIIHGFIDKGEENWLLDMCKNMFKVEEVNCICVDWKKGSQTSYTQAANNVRVVGAQVAQMLSMLSANYSYSPSQVQLIGHSLGAHVAGEAGSRTPGLGRITGLDPVEASFQGTPEEVRLDPTDADFVDVIHTDAAPLIPFLGFGTSQQMGHLDFFPNGGEEMPGCKKNALSQIVDLDGIWEGTRDFVACNHLRSYKYYSESILNPDGFASYPCASYRAFESNKCFPCPDQGCPQMGHYADKFAVKTSDETQKYFLNTGDSSNFARWRYGVSITLSGKRATGQAKVALFGSKGNTHQFNIFKGILKPGSTHSNEFDAKLDVGTIEKVKFLWNNNVVNPTFPKVGAAKITVQKGEEKTVHSFCSESTVREDVLLTLTPC

SEQ ID NO: 266 - protein, 229 aa, Mus musculus; identical to SEQ ID NO: 219

SEQ ID NO: 267 - protein, 232 aa, Mus musculus; identical to SEQ ID NO: 224

SEQ ID NO: 268 - protein, 253 aa, Homo sapiens; identical to SEQ ID NO: 239

SEQ ID NO: 269 - protein, 327 aa, Homo sapiens
MAWWKAWIEQEGVTVKSSSHFNPDPDAETLYKAMKGIGTNEQAIIDVLTKRSNTQRQQIAKSFKAQFGKDLTETLKSELSGKFERLIVALMYPPYRYEAKELHDAMKGLGTKEGVIIEILASRTKNQLREIMKAYEEDYGSSLEEDIQADTSGYLERILVCLLQGSRDDVSSFVDPALALQDAQDLYAAGENIRGTDEMKFITILCTRSATHLLRVFEEYEKIANKSIEDSIKSETHGSLEEAMLTVVKCTQNLHSYFAERLYYAMKGAGTRDGTLIRNIVSRSEIDLNLIKCHFKKMYGKTLSSMIMEDTSGDYKNALLSLVGSDP

SEQ ID NO: 270 - protein, 315 aa, Homo sapiens
MDLRQFLMCLSLCTAFALSKPTEKKDRVHHEPQLSDKVHNDAQSFDYDHDAFLGAEEAKTFDQLTPEESKERLGKIVSKIDGDKDGFVTVDELKDWIKFAQKRWIYEDVERQWKGHDLNEDGLVSWEEYKNATYGYVLDDPDPDDGFNYKQMMVRDERRFKMADKDGDLIATKEEFTAFLHPEEYDYMKDIVVQETMEDIDKNADGFIDLEEYIGDMYSHDGNTDEPEWVKTEREQFVEFRDKNRDGKMDKEETKDWILPSDYDHAEAEARHLVYESDQNKDGKLTKEEIVDKYDLFVGSQATDFGEALVRHDEF

SEQ ID NO: 271 - protein, 224 aa, Bos taurus; identical to SEQ ID NO: 102

SEQ ID NO: 272 - protein, 105 aa, Homo sapiens
MAKISSPTETERCIESLIAVFQKYAGKDGYNYTLSKTEFLSFMNTELAAFTKNQKDPGVLDRMMKKLDTNSDGQLDFSEFLNLIGGLAMACHDSFLKAVPSQKRT

SEQ ID NO: 273 - protein, 413 aa, Rattus norvegicus
MDRHLCICREIQLRSGLLFPFLLLMMLADLALPAQRHPPVVLVPGDLGNQLEAKLDKPKVVHYLCSKRTDSYFTLWLNLELLLPVIIDCWIDNIRLVYNRTSRTTQFPDGVDVRVPGFGETFSLEFLDPSKRNVGSYFYTMVESLVGWGYTRGEDVRGAPYDWRRAPNENGPYFLALQEMIEEMYQMYGGPVVLVAHSMGNMYMLYFLQRQPQAWKDKYIQAFVSLGAPWGGVAKTLRVLASGDNNRIPVIGPLKIREQQRSAVSTSWLLPYNHTWSHEKVFVYTPTANYTLRDYHRFFQDIGFEDGWFMRQDTQGLVEALVPPGVELHCLYGTGVPTPNSFYYENFPDRDPKICFGDGDGTVNLESVLQCQAWQSRQEHKVSLQELPGSEHIEMLANATTLAYLKRVLLEEP

SEQ ID NO: 274 - protein, 782 aa, Homo sapiens [sequence omitted]

SEQ ID NO: 275 - protein, 806 aa, Homo sapiens; identical to SEQ ID NO: 22

SEQ ID NO: 276 - protein, 752 aa, Homo sapiens [sequence omitted]

SEQ ID NO: 277 - protein, 103 aa, Sus scrofa
MTSKLAVAFLAVFLLSAALCEAAVLARVSAELRCQCINTHSTPFHPKFIKELRVIESGPHCENSEIIVKLVNGKEVCLDPKEKWVQKVVQIFLKRTEKQQQQQ

SEQ ID NO: 278 - protein, 70 aa, Oryctolagus cuniculus
GICPRFAHVIENLLLGTPSSYETSLKEFEPDDTMKDAGMQMKKVLDSLPQTTRENIMKLTEKIVKSPLCM

SEQ ID NO: 279 - protein, 752 aa, Mus musculus; identical to SEQ ID NO: 44

SEQ ID NO: 280 - protein, 752 aa, Mus musculus
MQFFGRLVNTLSSVTNLFSNPFRVKEVSLTDYVSSERVREEGQLILLQNVSNRTWDCVLVSPRNPQSGFRLFQLESEADALVNFQQFSSQLPPFYESSVQVLHVEVLQHLTDLIRNHPSWTVTHLAVELGIRECFHHSRIISCANSTENEEGCTPLHLACRKGDSEILVELVQYCHAQMDVTDNKGETAFHYAVQGDNPQVLQLLGKNASAGLNQVNNQGLTPLHLACKMGKQEMVRVLLLCNARCNIMGPGGFPIHTAMKFSQKGCAEMIISMDSNQIHSKDPRYGASPLHWAKNAEMARMLLKRGCDVDSTSSSGNTALHVAVMRNRFDCVMVLLTYGANAGARGEHGNTPLHLAMSKDNMEMVKALIVFGAEVDTPNDFGETPALIASKISKQLQDLMPISRARKPAFILSSMRDEKRSHDHLLCLDGGGVKGLVIIQLLIAIEKASGVATKDLFDWVAGTSTGGILALAILHSKSMAYMRGVYFRMKDEVFRGSRPYESGPLEEFLKREFGEHTKMTDVKKPKVMLTVTLSDRQPAELHLFRNYDAPEAVREPRCNQNINLKPPTQPADQLVWRAARSSGAAPTYFRPNGRFLDGGLLANNPTLDAMTEIHEYNQDMIRKGQGNKVKKLSIVVSLGTGKSPQVPVTCVDVFRPSNPWELAKTVFGAKELGKMVVDCCTDPDGRAVDRARAWCEMVGIQYFRLNPQLGSDIMLDEVSDAVLVNALWETEVYIYEHREEFQKLVQLLLSP

SEQ ID NO: 281 - protein, 547 aa, Macaca fascicularis
MKFSQKGCAEMIISMDSSQIHSKDPRYGASPLHWAKNAEMARMLLKRGCNVNSTSSAGNTALHVAVMRNRFDCAIVLLTHGANADAHGEHGNTPLHLAMSKDNVEMIKALIVFGAEVDTPNDFGETPTFLASKISRLDTRKAILTLLRTVGAEYCSPPIHGVPAEQGFAAPHHPFSLERAQPPPISLNNLELQDLMHISRARKPAFILGSMRDEKRTHDHLLCLDGGGVKGLIIIQLLIAIEKASGVATKDLFDWVAGTSTGGILALAILHGKSMAYMRGVYFRMKDEVFRGSRPYESGPLEEFLKREFGEHTKMTDVKKPKVMLTGTLSDRQPAELHLFRNYDAPETVREPRFNQNVNLRPPAQPSDQLVWRAARSSGAAPTYFRPNGRFLDGELLANNPTLDAMTEIHEYNQDLIRKGQANKVKKLSIVVSLGTGRSPQVPVTCVDVFRPSNPWELAKTVFGAKELGKMVVDCCTDPDGRAVDRARAWCEMVGIQYFRLNPQLGTDIMLDEVSDTVLVNALWETEVYIYEHHEEFQKLIQLLLSP

SEQ ID NO: 282 - protein, 968 aa, Homo sapiens
MLLSPSLLLLLLLGAPRGCAEGVAAALTPERLLEWQDKGIFVIQSESLKKCIQAGKSVLTLENCKQANKHMLWKWVSNHGLFNIGGSGCLGLNFSAPEQPLSLYECDSTLVSLRWRCNRKMITGPLQYSVQVAHDNTVVASRKYIHKWISYGSGGGDICEYLHKDLHTIKGNTHGMPCMFPFQYNHQWHHECTREGREDDLLWCATTSRYERDEKWGFCPDPTSAEVGCDTIWEKDLNSHICYQFNLLSSLSWSEAHSSCQMQGGTLLSITDETEENFIREHMSSKTVEVWMGLNQLDEHAGWQWSDGTPLNYLNWSPEVNFEPFVEDHCGTFSSFMPSAWRSRDCESTLPYICKKYLNHIDHEIVEKDAWKYYATHCEPGWNPYNRNCYKLQKEEKTWHEALRSCQADNSALIDITSLAEVEFLVTLLGDENASETWIGLSSNKIPVSFEWSNDSSVIFTNWHTLEPHIFPNRSQLCVSAEQSEGHWKVKNCEERLFYICKKAGHVLSDAESGCQEGWERHGGFCYKIDTVLRSFDQASSGYYCPPALVTITNRFEQAFITSLISSVVKMKDSYFWIALQDQNDTGEYTWKPVGQKPEPVQYTHWNTHQPRYSGGCVAMRGRHPLGRWEVKHCRHFKAMSLCKQPVENQEKAEYEERWPFHPCYLDWESEPGLASCFKVFHSEKVLMKRTWREAEAFCEEFGAHLASFAHIEEENFVNELLHSKFNWTEERQFWIGFNKRNPLNAGSWEWSDRTPVVSSFLDNTYFGEDARNCAVYKANKTLLPLHCGSKREWICKIPRDVKPKIPFWYQYDVPWLFYQDAEYLFHTFASEWLNFEFVCSWLHSDLLTIHSAHEQEFIHSKIKALSKYGASWWIGLQEERANDEFRWRDGTPVIYQNWDTGRERTVNNQSQRCGFISSITGLWGSEECSVSMPSICKRKKVWLIEKKKDTPKQHGTCPKGWLYFNYK

SEQ ID NO: 283 - protein, 327 aa, Homo sapiens
MAWWKAWIEQEGVTVKSSSHFNPDPDAETLYKAMKGIGTNEQAIIDVLTKRSNTQRQQIAKSFKAQFGKDLTETLKSELSGKFERLIVALMYPPYRYEAKELHDAMKGLGTKEGVIIEILASRTKNQLREIMKAYEEDYGSSLEEDIQADTSGYLERILVCLLQGSRDDVSSFVDPALALQDAQDLYAAGEKIRGTDEMKFITILCTRSATHLLRVFEEYEKIANKSIEDSIKSETHGSLEEAMLTVVKCTQNLHSYFAERLYYAMKGAGTRDGTLIRNIVSRSEIDLNLIKCHFKKMYGKTLSSMIMEDTSGDYKNALLSLVGSDP

SEQ ID NO: 284 - protein, 346 aa, Homo sapiens; identical to SEQ ID NO: 96

SEQ ID NO: 285 - protein, 224 aa, Bos taurus; identical to SEQ ID NO: 102

SEQ ID NO: 286 - protein, 229 aa, Mus musculus
MSQGDSNPAAIPHAAEDIQGDDRWMSQHNRFVLDCKDKEPDVLFVGDSMVQLMQQYEIWRELFSPLHALNFGIGGDTTRHVLWRLKNGELENIKPKVIVVWVGTNNHENTAEEVAGGIEAIVQLINTRHAQAKIIVLGLLPRGEKPNPLRQKNAKVNQLLKVSLPKLANVQLLDIDGGFVHSDGAISCHDMFDFLHLTGGGYAKICKPLHELIMQLLEETPGEKQTTIA

SEQ ID NO: 287 - protein, 232 aa, Mus musculus; identical to SEQ ID NO: 224

SEQ ID NO: 288 - protein, 346 aa, Homo sapiens; identical to SEQ ID NO: 96

SEQ ID NO: 289 - DNA, 15715 bp, Homo sapiens
aagcgcgtcgccaccgcccccgcctaggcgagagcccagagagctgaacctgcatcccggacctgcggcgaccgtcgtacaccatgggcctccacctccgcccctaccgtgtggggctgctcccggatggcctcctgttcctcttgctgctgctaatgctgctcgcggacccagcgctcccggccggacgtcaccccccagtggtgctgggtgaggcacgggtctcgtggtggatctgtcggtcgggcgggacgggccgcgggcggggctgccttcccggtctgcttctgttccagtcacgaaatgggggagcgtattggtatctgtcttgtcacttaggtgatctagatctgccggctcacctcccgccatgctgggcgcgggtgtggtcagctccccacctcctgtcctggtagaaaatgggggtgagtgggagagttaccatctggttattcatagttccacctgtccgcatcattcccaagccttgcctccccttatcccatttttaagctggaaagacaggtgcttcagccccactcctgagggatggtgggggtgtgtagagtggctcctgagttgacttctgcatcgacctgggcctggttaggaggctgtcaccctcgacccctccaatgccacatatgccagaaggcattgctgaaaggaacctccttagggaaaggattgctgtcctagctggccaccaactcccacaacttatcagatgtgtggcattgcctgagggaaaaggcctaagggaaactgaagacaactgaagtcaggggaaagggttgggacaatggccatgaacctgtgtcaggcaacatgcttgtactcttaccctgccacacatgcttggactagactatgtggaggctcggtgacctcccctgctcaccccgctccttgatcacaaccctggcaactctacaacggccactgtatttccttgcagggatgggcagggatgagacctctgtctggggggccttgggtgcctcattgaggccgtcactcccatccagagctggtgtgtccgtggccagccaggattcctgaaagcagaggcatctgaggcatgaattacacgtggagtctagtgcagcatgatctccatgctctttctgctgagagtactttaaatggggacgatgcaaatcacagaagggtagagttggcaggtagggtggtgccaggcaggccccaccaggagttcccagccaggaaaagctccagggggatactaggcccaggttcaccatgggatttgggcagacttggccctgcctccccaaagcttgcaggataggaataacagtgatccccagagaggaagtctgtgtggggcaagcacagagaatccaccaacccagcctggatgggtgggtgtcaagtaaggcttcctggagtatatagctggagctaaggccaggagagagtaatgggtcggggagagacgtgagcatctcaggctgcctgggatcgagtcacaggaggagtggactgcacaggacttgtgactggttgggtcatctgaactttatcttgagggcctcagggagtcctgggttggcctgcagagttctaagtctgaggggcgtggcattaggaagcatgtggtctgtggcacacaaaatggcacatagccattttgcctggattgatgctaaccgcactcatcaattcagtcagtctgtttatccttggtcacagcagaagagcctcagaccccacccagaatcacagagcagcaggagtcctaacatgcccagcttctcagggagtgaggctgctggccttagccctgggagacctcacggtgggcagttggataagcagctcctgggcacagagcagggatctgaccttgactgtcagaagatcagaatcctctaggggtggatcctgaaatggtggtggaggaaagagagaccagcgatgtgatacagaagaccctgggcaaggggaagggaccataggcaaggccatttccacctcttgcagcctcagtctccccatctgttaagtggaaatagtaaggctgtcccctcccagtgttacttgaggtgaaaggcatgtggatggctcttttcctagttccaggcgcagatgggctcaggaagtggccactgctatttttaggggccacacagcctgaccagggtaaggagcatctgagcaaagcagatctggtgacttcctcttttaccatttcccctttggtagagacagtgaccagggtctctgccctgccctgcccagtccacaggcatgtcatccagaggctgtcatgacagggactccctccctctgcacccataccatgaagggaggtgaaggcatgtgccgcccctgcctctcatggcaccctgaagacactgggatggtgcccagggagggcacgccctgttcagggtggatttacggtcagttcccagtgaatgtccaggagagccaagtgctggtttttcactcaatgatcatggaccctaaacggggatgtgtttgggaagtggcgagagcatggcatgtgggggcaggtgaggcccgaaaggtcaatgggagtaacgagactgtgaagggctttgacgcagtggggagggatttgggtgtcaccagggccccagagttctgagtacactgaataggatggctgggatggagagaagtcaccctagggcctggactgtggtgataatggtgctggttcagggtggctgtttccaatacgggctcccagccatgctagggccctccagatgatctgctctctggcaccttactggactctggcctttagtaaggcctgggcccttggtaggctggcgggtgccaatgtaagcttctctcagctgtgtttctgttcatttccctcccaccagcctgtcctgcatactttgtctggttgaattttagctgagtggcccagggctctgttctgtttccttcttcctctctcagggcgaacaggaccctgtcttctatgtagcctgggatagctatgggtggaagacttttgggttcaagcctccagggtatatatctttttttttttttgagaccgggtcttgctctgtcacccaggctggagggcaatggcacgattttggctcactgcaacctctgcctcccgggttcaagcaattctcctgtcttaggctcctgagtagctgggattacaggtgtgtgccaccacaccaaggtaattttttgtatttttagtagagatgggctttcaccatattggccaagctggtcttgaactcctgaccgcaagtgatccactcacctcggcctcccaaagtgctgggattacaggcatgagcccctgcgccctgcctcgaaggtatatatctaatgacaagggccttggccaaactttggaggttctggaatgcaaaggggtctccaagcccctcctcccaggcagagctcccatcggggtccattaaccatagaaaccatgtgtagaggtgtgtctgtgtttgctgggggtgattcagaccaagatctcatttaacagatacggaaactgaggcctagtgtggggagtgacttcaccctgaacccccttccaataatctgaatggcccaggaggatgttccagtgaaaatccaggagacttactttatctggagttggagacaatgttagggcccttccccaaacatgtcaggcctctcccaagccccccacaggcatctctgcaccacacagcagtagcagcttttctgcacaaagatggttccctggcctttgggtcaaggtccctgctctctgaatttcctgccaccagcactgtgctttaatttgagatgtggaactgcacaggtctgccatattatctgtggctcttcagggggtctgctgcagacatcaaagttcttgggagtcttgaacctgccgggctgagggctcacacatgtcctgtgccccctgcagtccctggtgatttgggtaaccaactggaagccaagctggacaagccgacagtggtgcactacctctgctccaagaagaccgaaagctacttcacaatctggctgaacctggaactgctgctgcctgtcatcattgactgctggattgacaatatcaggtgggggctggggcacacagaggggggtgctgctcaccaacagtgcctgagaggcctccagagtctgttccttctatcctcatctcgaggtcactgacctctctccttccccaggtcctcggtctggtctggtctggtctggttggcaccacctctgcactcccaggcagaactaactttcccttcctgctgcccttgttcctctactctccagtcctggcctctcatgcctacacacaattttttttttcttttattttgggatggagtcttgctgtgtcactcaggctggcgccatctcagctcactgcaacctccgtctcccaggttcaagcgattcttgtgcctcagcctcccaagtagctgggattacaggtgcccgccaccatgcctggctaattttttgtatttttagtggagatggtgtttcaccatgttggccatgctggtcttgaactcctgagctcaagtgttctgcccaccttggactcccaaagtgctgggattacaggcatgagccactacgcctgcctacacaaaatttctgtgtcccagcccctattcagagcctcggcatggcccccacccctttccttgtctgtgcctcggcctcccctacctctccagctgcttattcttcttgggacatgccatgtctttgtacctgctgttcttttggcctggaatctatttctacaccctttgcctgataaatggcttccattcacttttttttttttttttttttttggagacggagttttgctcttattgcccaggctggagtgcaatggcgcgatctcggctcacaactcttttttttttttttaacttttattttttgagacagagtcttgctctgtcgcccaggctgggtgcagtggcgctatctcggctcactgcaagctccgcctcccgggttcacgccattcttctgcctcagcctcccaagtagctgggaccacaggcgcccgccacagtgcccggctaattttttgtattttttagtagagacagggtttcaccgtgttaaccaggatggtctccatctactgaccttgtgatccgcctgcctcagcctcccaaagtgctgggattacaggcgtgagccaccacacccagccccattcactctttaaaacatgaccctaggccaggcatggtggctctgctataatcccatcactttgggaggctgaggcagtcagatcacctgagctcaggagttgaagaccagcctgggcaacttggtgaaaccccatctctaccaaaaatacaaaaaaattagctgggcatggtggcatgcacctgtagtcccagctacttagggggctgaggcaggagaattgcttgagccagggaagcagaggttgcagtgagcagaccactgtacccagcctgggttgcagagcaagaccctgtctcaaaacaacaaaaacctgaccctggtccctttgtgacatgtcccttttgactccccagagcggtttgcctctcctcccaggccccatgcttgcttcctctaaacatcatcatgtgcccgaatttgtctgcaggcatgtttgcccaaattgcacaggcactgtacattttatatactttctttcagttagtcttacagcaaccccgttttgaaataggtgctgttttctttttttttttttcaccagtgttacttgccaacaggtggtttttaaacctgctttacaactgcgaaatctggaggctcaatgaggttacaaaattgactgtgctcactcagctaataagtggtagaatcagaattcaaatccagaatgtgtggcgttgagctgaggttccctcccaggctgagttccgtgaagggagggagtgtgtgtctgttttatccttatagcagtagaaccagaaacacagttggcgcctgataaatgtttgagctgaatggagtctcccaaattaaaagtttttcctggtcgggtgcggtggctcatgcctgtaatcccagcactttgggaggctgaggtggacagatcatgaggtcaggagttcgagactagcccggccaacacagtgaaaccctgtctctactaaaaatgcaaaaattaaggccgggcatggtggctcacgcctgtaatcccagctagtcaggagtctgaggcaggagaaacgcttgaacctgggtggtggaagttgcagtgagctgagatcgtgccattgtactccagcccaggtgacagtacaagactccatctcaaaaaaaagaaaatacaaaaatacaaaaatgagccgggcgtggtggcacacgcccatgatcccagctactcgggaggctgagacaggagaatcacttgaacctgggaggcagaggttgcagtgagcagagatgggggcactgcactctagcctgggtgacagagcgagactgtctcaaaaaaaaaaaaaaaaaaaagtttttcccagagacccgctagctgctcctccaggtgccctggcctgccggctgtttgtgatgcccattttgatgactccttcctcctctgtgtgttgtgtgactggggttatttctgggctgttgatgtgcatttctatttttatactggggacacagcctcaggtgctgccagttggaggtgccagctgataccaagaggggcctgtctgccttcactgcttctctgacccgtttagattttcacccagcgcagaactgctttggctttccagaacagttttctgcattttgctgtttgataatttatttttagtagcaacaagctactttgctatgtggtcattgggataatctacaaattgccctggagagaatgggcctccaggacctgttatctgggtcagttgtggggatcctgtcagcttcagtggctgatatctaagtgggcaagtgggactcaggaccaccagaaactccaggttcctgtgttttgggggcacatttgcttcttcagtgtgtggcgaggccagagcaaggttcccagcctcgcacagaggcacaaggcttttctcctggtataaggtgtctcccctggcccatcaccctgttcccatcatttcttcaggccttgacaaccctcttcccacaggagatggtgcagcagctgtgtactgagccctgaggcggggtctgtcctgtctggttctgtttggcactgcagctacagaaactatgagatcacgtgtgtggtgttagaagctgctgagtctgtggtaatttattacacagttctagaaaactaataggctgggtgcagtggctcacacctataatcccagcactttgggaggctaaggcaggaggatcgcttgagcccaggagtttgagaccagcatgagcacatagtgtggccctgtccctacaaaataaataaacaaataaataaataaattagccagacctggtggtgcctgcctagctgttcaggagggtgaggtaagaggatcacttgagcccaggaggttatggctacagtgagctatgatctcctcactgtgctgcagcctgggcaacagagtgagaccctgtctcaaaaaagaagaagaaagaaaagtaagaaagggctgttagggatcttaagtcagtagctggtggtccatgtcctatgtcatggcgcttaggaatttgctgggcaagccctgagccttgtggctgcagtctgacagttgatacagccctggggtactgggaggtcataggagcatggttcattcccttcctccatggaggatgtgtttggaggttggctggctgctgtgtccaatgcgcagaggaagcgggacccaattatacctacctggggccacacaaggccttcctcctgtctctccccaccagctcccatcatttctctgggccttgctccttctcctacctgcctacccacccatacagcagccctgaggcatggtgcctttctagggtttgtttttgtttgtttgtttgtttttttgagacagagtttcgctcttattgcccaggctggagtgcagtggcgcaatctcggctcactacacctctgcctcccaggctcaagcacttctcctgcctcagactccggataactgggattacaggtacacgtcaccatgcctggttaatttttgtgtttttagtagagatggggtttcaccctgttggccaggctggtctcgaactcctaacctcaagtgatccacgtgcctcagccttccaaagtgctgagattataggcgtgagcccctgtgcctggcctagtgtgttttgttttgttttttttttttttttgagacagggtcttactttgctgcccaggctggtgtgcagtggcatgatcacggctcactgcagcctcaatatcccaggtgcaagtcatcctcctgcctcagccttccaagtagctgggaccacaggcctgcaccaccatgcctggctaattttttatttttagtagcaacaaggcctcactgtattgcccaggctggccttgaactcctggcctcaagcattcctcccaccttggccttgcaaattgttggaactacaggtgtcagccactgcacccggcccctgtctggttctgttgtgtactgcactcaccacctccttcacctgggatacgttgggctggcaggagctggatgcaaggagatggagcgatggaaagctgaaagagggtagactgcctcttggggtccagtgtgaagttcacggcagaatcaggactggtacttccttctcccaaccaggtccaagaccctcattctagagtagggtcacgggggagaggggaatgttgctttgacaggggtcctggggtcagtatttggagtaagtatgccttggtggggtcctcatttggatgtaattactctgatctgtgctttttatttttatttatttatttatttatttatttatttatttatttatttttttgagacagagtcttgctctgtcgcccaggctggagtgcagtggtgtgatctcagctcactacaacctccgtgtcacaggttcaagcgattctcctgcctcagcctcctgagtagctgggattacagtcgcctcccacgacacccggctgattttgtatctttagtagagatggggtttcgccatgtttgtcaggctggtctcaaactcctcactcaggtgacctgccagcctcagcctcccaaagtgctgggattaacaggcgtgagccactgcacctgggcaatttttgtatttttagtagagacagggtttcaccatattggccaggctggtttcaaactcctgacctcaagtgatcctcccacctcagcctccctaagtgctgggattacaggtgatctgtgctttatcaacctgctttgttacttttcggtctctcctatccatctgaccaaacctgggcatgagaagggagtatgactcaggacatgatgcactgttgggacacaccaagctcagtgtcccctccgggtcactggctcaatatcctctcacaacaggctggtttacaacaaaacatccagggccacccagtttcctgatggtgtggatgtacgtgtccctggctttgggaagaccttctcactggagttcctggaccccagcaaaagcagcgtgggtatgtagcccttactcaaggcctccgggagctgggatggggtttctgccggactggagctggagctggaggaactctgctggtttgtagggacagcctgtgagctgtctctgatcagcgtgggcacagagccctgtagcattcttccaaggacctgctagctgtcacagtctccatgctgggcatagtgtaggtggccggcactagctgtatcttttcttatcctctgtatttctgtctacaggttcctatttccacaccatggtggagagccttgtgggctggggctacacacggggtgaggatgtccgaggggctccctatgactggcgccgagccccaagtaagcaggcactctcattccctccctgacgtctcgggaggtaggggtgaggtgatcatgggcaccacagaccttgggctctccccttgtccttggctgtctcctgtccctgggcctctggcatccagtctagtggtcacagccaccacctttggtcagtcttatcctgtcctccatttcccaccctgggacctctgggcctgtgagccctggggagaaatataaggcttcctcccttcatggaaggcggggggacccagaccgctctgtttgaatgtgagcaccctcccctccccctctcgtcttgtgtctggcctgagaaaagctcagtggttccggctccaggacccttcccacctgacccctgcctggctctggcctgcagatgaaaacgggccctacttcctggccctccgcgagatgatcgaggagatgtaccagctgtatgggggccccgtggtgctggttgcccacagtatgggcaacatgtacacgctctactttctgcagcggcagccgcaggcctggaaggacaagtatatccgggccttcgtgtcactgggtgcgccctgggggggcgtggccaagaccctgcgcgtcctggcttcaggtaagaccctacctggcccagcgtggggggctgttgccaggaattctgccctctcttcccttcctaagtgtcctcctgggccagcatgcctcgtgtctgtcccacggtgtgtggggtctatgcaaatctacccctaaaagtccaaagaagaaagaggctgacaaatctagtttctcagagaaaagcatttaatagggacatacgaatagaagccacatctgtgtctcaggtgggggcaagacaagatggtggatccccacactattagcccccagacccagagcttatattctgtagggaaagggcgactccgatgcgatgtgttgaacattgaaggatgataacacagaggctgttttgatttatggttaagtacgtgcacaagaaacagtagataaagtggaaatctcagtggccttcctggatctggggttaatcagaagccaacatggtggattagtatccaaaatggagttgctttggtctccacaatgactattctcttgggtcagccctgttttttttttaatttttattttttgagacagagtctggttctgtcacccagactggaatgcagtggtgcaatcttgtctcactgcaacctctgcctcccgggttcaagcgattctgcctcagcctcctgagtagctgggattacaggtgcccgccaccatgcctggctaagttttgtgttttagtagagatgaggtttcatcatgttggccaggctggtcttgaactcctgacctcagatgttccactcgcttcggcctcccaaagtgctgggattacaagtgtgagccactgtgcctggccatccctccctcttaccccatccttacttcttcatccccaccttcaccgcagaggaggaaggctagagcattttttttttttttttggaggcagggtctttctcactctgccatccaggttggagtgcagtagcgtgattttggttcatgcaacctccaccttccaggttcaagtgattctcctgcctcagcctcccgggtaactgggactacaggcgcgtaccaccacacccggctaatttttgtatttttagtagagactgggtttcactatgttggccgggctagtctctaactcctgacctcaagtcaggaggatctgcctgcctcagcctcccaaagtgctgggattacaagcatgaaccaccgcacccggccagatttttttgtatttttagtagagatggggtttcaccattttggtcaggctggtcttgaactcctgacctcaaatgatctgcccaccttgacctcccaaagttctgggattacaaggatgagccactgcacctggcctctagactacagttttttatttatgagttgcgcctccatctgtgggcagcacggagcctctgtaggcaacacagggaggaagcaggtgcagatctggctgggcctgcttgcctggcaattgggaaagccaccccttttatggctcctcccccgtcttttcatgactgttgcagctcaccagctgcagctgtagagtagagcttcttcctctagaagggagctttcctccctctgctaggacttgggggaggcttatggaccctcactttgggagctatgagccagggctgtgccaagcatctcatgagctcaagtgcctgccactgcttgacctgcttggtctactggcattgtgattgggtcaggcccagtgactctgagttggctggaagacactcagatttagtgaggactcattatagccaccacttcggtctagcctgggcctggagggacggatgtgggcataccctgagtttagacaggtagccccggcccctttcagagtttctctgtgagtccccttagagctttgtttcaaaggctgggaagctgttctgtcctgccttggcagtccaggactgggtgtgtggtgcggggaggtggaagtccgtgcacccctaggggctttccttgcctcaggggtcccccagccaggccacagcaggcagagctgaggccctacagtcagtctgagaggcctccctgctttcagatacagggtggggtgatgggtgaccatggatcctgaacaggccagaggcccctgttcccaagttgcagcttttacttcctggaggcctccctgactgccgggtgtttgtgttgttcacattcctgtgtatagggactccgcctccatctgcagcctcccctcgtgccctgtctccagcacgcctggctgcccaggtcagcgcacatgcaagtgggtggaatgaggccacggctggctgaacgctggtctgagcttaggaaaagaaaaactggtacacagttcagtgtcataaaagggaaagcagaacatgtcatctccgagttgccaacctgctgactcactttagactaggtcagtgcccacaggcctgatcagcacttggaggatggtagagtttacaggcaaggaagcatcataaatcaccctgtgggtatgtgccgccttactccctggtgaggaaagcaaaaaaaacaaaacatagcttggatgtgtggttcccagatgtagcaaaaataaagagaaacaataaaagccaaggcaagcaaactgggcaacatagcaagaccccatctgtataaaaagtggaaacatttttagcccaggcgtggtgggacgtgcttgtagttccagctatgcaggaggctgacataggaggatcacttgaacccaggaggtggaggttgtagtgagccaagactgtaccactgcactccagcctgggtgacagaatgagaccctacttcaaaaaaaaaaaaaaggaaaaatttgccaggcatgaggcatggtggcgcatacctgtagtcccagctactccaaaggctgaggcgggaggattggttgagcctgagaggttgaggctgctgtgagccgtgatcatgccattatactccagcctgggcaacagagtgagaccctgtctcaaaaagaaaaaaaaagagccaaggcagggatgggagtcacagtgattacaatgatgataaccgggtagagatgcgggactgtggactgggcccctggctggggtctggcaggggcctggtggtgaacatgctgcccaaccagctggcattcctaagcacagactgaccagagccttctccctgcaggagacaacaaccggatcccagtcatcgggcccctgaagatccgggagcagcagcggtcagctgtctccaccagctggctgctgccctacaactacacatggtcacctgagaaggtgttcgtgcagacacccacaatcaactacacactgcgggactaccgcaagttcttccaggacatcggctttgaagatggctggctcatgcggcaggacacagaagggctggtggaagccacgatgccacctggcgtgcagctgcactgcctctatggtactggcgtccccacaccagactccttctactatgagagcttccctgaccgtgaccctaaaatctgctttggtgacggcgatggtactgtgaacttgaagagtgccctgcagtgccaggcctggcagagccgccaggagcaccaagtgttgctgcaggagctgccaggcagcgagcacatcgagatgctggccaacgccaccaccctggcctatctgaaacgtgtgctccttgggccctgactcctgtgccacaggactcctgtggctcggccgtggacctgctgttggcctctggggctgtcatggcccacgcgttttgcaaagtttgtgactcaccattcaaggccccgagtcttggactgtgaagcatctgccatggggaagtgctgtttgttatcctttctctgtggcagtgaagaaggaagaaatgagagtctagactcaagggacactggatggcaagaatgctgctgatggtggaactgctgtgaccttaggactggctccacagggtggactggctgggccctggtcccagtccctgcctggggccatgtgtcccccctattcctgtgggcttttcatacttgcctactgggccctggccccgcagccttcctatgagggatgttactgggctgtggtcctgtacccagaggtcccagggatcggctcctggcccctcgggtgacccttcccacacaccagccacagataggcctgccactggtcatgggtagctagagctgctggcttccctgtggcttagctggtggccagcctgactggcttcctgggcgagcctagtagctcctgcaggcaggggcagtttgttgcgttcttcgtggttcccaggccctgggacatctcactccactcctacctcccttaccaccaggagcattcaagctctggattgggcagcagatgtgcccccagtcccgcaggctgtgttccaggggccctgatttcctcggatgtgctattggccccaggactgaagctgcctcccttcaccctgggactgtggttccaaggatgagagcaggggttggagccatggccttctgggaacctatggagaaagggaatccaaggaagcagccaaggctgctcgcagcttccctgagctgcacctcttgctaaccccaccatcacactgccaccctgccctagggtctcactagtaccaagtgggtcagcacagggctgaggatggggctcctatccaccctggccagcacccagcttagtgctgggactagcccagaaacttgaatgggaccctgagagagccaggggtcccctgaggcccccctaggggctttctgtctgccccagggtgctccatggatctccctgtggcagcaggcatggagagtcagggctgccttcatggcagtaggctctaagtgggtgactggccacaggccgagaaaagggtacagcctctaggtggggttcccaaagacgccttcacgctggactgagctgctctcccacagggtttctgtgcagctggattttctctgttgcatacatgcctggcatctgtctccccttgttcctgagtggccccacatggggctctgagcaggctgtatctggattctggcaataaaagtactctggatgctgtaa

SEQ ID NO: 290 - DNA, 2764 bp, Homo sapiens
aagcgcgtcgccaccgcccccgcctaggcgagagcccagagagctgaacctgcatcccggacctgcggcgaccgtcgtacaccatgggcctccacctccgcccctaccgtgtggggctgctcccggatggcctcctgttcctcttgctgctgctaatgctgctcgcggacccagcgctcccggccggacgtcaccccccagtggtgctggtccctggtgatttgggtaaccaactggaagccaagctggacaagccgacagtggtgcactacctctgctccaagaagaccgaaagctacttcacaatctggctgaacctggaactgctgctgcctgtcatcattgactgctggattgacaatatcaggctggtttacaacaaaacatccagggccacccagtttcctgatggtgtggatgtacgtgtccctggctttgggaagaccttctcactggagttcctggaccccagcaaaagcagcgtgggttcctatttccacaccatggtggagagccttgtgggctggggctacacacggggtgaggatgtccgaggggctccctatgactggcgccgagccccaaatgaaaacgggccctacttcctggccctccgcgagatgatcgaggagatgtaccagctgtatgggggccccgtggtgctggttgcccacagtatgggcaacatgtacacgctctactttctgcagcggcagccgcaggcctggaaggacaagtatatccgggccttcgtgtcactgggtgcgccctgggggggcgtggccaagaccctgcgcgtcctggcttcaggagacaacaaccggatcccagtcatcgggcccctgaagatccgggagcagcagcggtcagctgtctccaccagctggctgctgccctacaactacacatggtcacctgagaaggtgttcgtgcagacacccacaatcaactacacactgcgggactaccgcaagttcttccaggacatcggctttgaagatggctggctcatgcggcaggacacagaagggctggtggaagccacgatgccacctggcgtgcagctgcactgcctctatggtactggcgtccccacaccagactccttctactatgagagcttccctgaccgtgaccctaaaatctgctttggtgacggcgatggtactgtgaacttgaagagtgccctgcagtgccaggcctggcagagccgccaggagcaccaagtgttgctgcaggagctgccaggcagcgagcacatcgagatgctggccaacgccaccaccctggcctatctgaaacgtgtgctccttgggccctgactcctgtgccacaggactcctgtggctcggccgtggacctgctgttggcctctggggctgtcatggcccacgcgttttgcaaagtttgtgactcaccattcaaggccccgagtcttggactgtgaagcatctgccatggggaagtgctgtttgttatcctttctctgtggcagtgaagaaggaagaaatgagagtctagactcaagggacactggatggcaagaatgctgctgatggtggaactgctgtgaccttaggactggctccacagggtggactggctgggccctggtcccagtccctgcctggggccatgtgtcccccctattcctgtgggcttttcatacttgcctactgggccctggccccgcagccttcctatgagggatgttactgggctgtggtcctgtacccagaggtcccagggatcggctcctggcccctcgggtgacccttcccacacaccagccacagataggcctgccactggtcatgggtagctagagctgctggcttccctgtggcttagctggtggccagcctgactggcttcctgggcgagcctagtagctcctgcaggcaggggcagtttgttgcgttcttcgtggttcccaggccctgggacatctcactccactcctacctcccttaccaccaggagcattcaagctctggattgggcagcagatgtgcccccagtcccgcaggctgtgttccaggggccctgatttcctcggatgtgctattggccccaggactgaagctgcctcccttcaccctgggactgtggttccaaggatgagagcaggggttggagccatggccttctgggaacctatggagaaagggaatccaaggaagcagccaaggctgctcgcagcttccctgagctgcacctcttgctaaccccaccatcacactgccaccctgccctagggtctcactagtaccaagtgggtcagcacagggctgaggatggggctcctatccaccctggccagcacccagcttagtgctgggactagcccagaaacttgaatgggaccctgagagagccaggggtcccctgaggcccccctaggggctttctgtctgccccagggtgctccatggatctccctgtggcagcaggcatggagagtcagggctgccttcatggcagtaggctctaagtgggtgactggccacaggccgagaaaagggtacagcctctaggtggggttcccaaagacgccttcacgctggactgagctgctctcccacagggtttctgtgcagctggattttctctgttgcatacatgcctggcatctgtctccccttgttcctgagtggccccacatggggctctgagcaggctgtatctggattctggcaataaaagtactctggatgctgtaaaaaaaaaaaaaaaaaaaaaaaaaaaaaaaaaaaaaaaaaaa
